United States Patent Application Publication US 2023/0302116 A1 - sequence listing, part 5

SEQ ID NO: 5544 - protein, 1281 aa, Artificial Sequence
  Description of Artificial Sequence: Synthetic polypeptide
MGILPSPGMPALLSLVSLLSVLLMGCVAETGTQCVNLTTRTQLPPAYTNSFTRGVYYPDKVFRSSVLHSTQDLFLPFFSNVTWFHAIHVSGTNGTKRFDNPVLPFNDGVYFASTEKSNIIRGWIFGTTLDSKTQSLLIVNNATNVVIKVCEFQFCNDPFLGVYYHKNNKSWMESEFRVYSSANNCTFEYVSQPFLMDLEGKQGNFKNLREFVFKNIDGYFKIYSKHTPINLVRDLPQGFSALEPLVDLPIGINITRFQTLLALHRSYLTPGDSSSGWTAGAAAYYVGYLQPRTFLLKYNENGTITDAVDCALDPLSETKCTLKSFTVEKGIYQTSNFRVQPTESIVRFPNITNLCPFGEVFNATRFASVYAWNRKRISNCVADYSVLYNSASFSTFKCYGVSPTKLNDLCFTNVYADSFVIRGDEVRQIAPGQTGKIADYNYKLPDDFTGCVIAWNSNNLDSKVGGNYNYLYRLFRKSNLKPFERDISTEDYQAGSTPCNGVEGFNCYFPLQSYGFQPTNGVGYQPYRVVVLSFELLHAPATVCGPKKSTNLVKNKCVNFNFNGLTGTGVLTESNKKFLPFQQFGRDIADTTDAVRDPQTLEILDITPCSFGGVSVITPGTNTSNQVAVLYQDVNCTEVPVAIHADQLTPTWRVYSTGSNVFQTRAGCLIGAEHVNNSYECDIPIGAGICASYQTQTNSPSGAGSVASQSIIAYTMSLGAENSVAYSNNSIAIPTNFTISVTTEILPVSMTKTSVDCTMYICGDSTECSNLLLQYGSFCTQLNRALTGIAVEQDKNTQEVFAQVKQIYKTPPIKDFGGFNFSQILPDPSKPSKRSFIEDLLFNKVTLADAGFIKQYGDCLGDIAARDLICAQKFNGLTVLPPLLTDEMIAQYTSALLAGTITSGWTFGAGAALQIPFAMQMAYRFNGIGVTQNVLYENQKLIANQFNSAIGKIQDSLSSTASALGKLQDVVNQNAQALNTLVKQLSSNFGAISSVLNDILSRLDPPEAEVQIDRLITGRLQSLQTYVTQQLIRAAEIRASANLAATKMSECVLGQSKRVDFCGKGYHLMSFPQSAPHGVVFLHVTYVPAQEKNFTTAPAICHDGKAHFPREGVFVSNGTHWFVTQRNFYEPQIITTDNTFVSGNCDVVIGIVNNTVYDPLQPELDSFKEELDKYFKNHTSPDVDLGDISGINASVVNIQKEIDRLNEVAKNLNESLIDLQELGKYEQYIKGSGRENLYFQGGGGSGYIPEAPRDGQAYVRKDGEWVLLSTFLGHHHHHHHH

SEQ ID NO: 5545 - protein, 1281 aa, Artificial Sequence
  Description of Artificial Sequence: Synthetic polypeptide
MGILPSPGMPALLSLVSLLSVLLMGCVAETGTQCVNLTTRTQLPPAYTNSFTRGVYYPDKVFRSSVLHSTQDLFLPFFSNVTWFHAIHVSGTNGTKRFDNPVLPFNDGVYFASTEKSNIIRGWIFGTTLDSKTQSLLIVNNATNVVIKVCEFQFCNDPFLGVYYHKNNKSWMESEFRVYSSANNCTFEYVSQPFLMDLEGKQGNFKNLREFVFKNIDGYFKIYSKHTPINLVRDLPQGFSALEPLVDLPIGINITRFQTLLALHRSYLTPGDSSSGWTAGAAAYYVGYLQPRTFLLKYNENGTITDAVDCALDPLSETKCTLKSFTVEKGIYQTSNFRVQPTESIVRFPNITNLCPFGEVFNATRFASVYAWNRKRISNCVADYSVLYNSASFSTFKCYGVSPTKLNDLCFTNVYADSFVIRGDEVRQIAPGQTGKIADYNYKLPDDFTGCVIAWNSNNLDSKVGGNYNYLYRLFRKSNLKPFERDISTEIYQAGSTPCNGVEGFNCYFPLQSYGFQPTNGVGYQPYRVVVLSFELLHAPATVCGPKKSTNLVKNKCVNFNFNGLTGTGVLTESNKKFLPFQQFGRDIADTTDAVRDPQTLEILDITPCSFGGVSVITPGTNTSNQVAVLYQDVNCTEVPVAIHADQLTPTWRVYSTGSNVFQTRAGCLIGAEHVNNSYECDIPIGAGICASYQTQTNSPSGAGSVASQSIIAYTMSLGAENSVAYSNNAIAIPTNFTISVTTEILPVSMTKTSVDCTMYICGDSTECSNLLLQYGSFCTQLNRALTGIAVEQDKNTQEVFAQVKQIYKTPPIKDFGGFNFSQILPDPSKPSKRSFIEDLLFNKVTLADAGFIKQYGDCLGDIAARDLICAQKFNGLTVLPPLLTDEMIAQYTSALLAGTITSGWTFGAGAALQIPFAMQMAYRFNGIGVTQNVLYENQKLIANQFNSAIGKIQDSLSSTASALGKLQDVVNQNAQALNTLVKQLSSNFGAISSVLNDILSRLDPPEAEVQIDRLITGRLQSLQTYVTQQLIRAAEIRASANLAATKMSECVLGQSKRVDFCGKGYHLMSFPQSAPHGVVFLHVTYVPAQEKNFTTAPAICHDGKAHFPREGVFVSNGTHWFVTQRNFYEPQIITTDNTFVSGNCDVVIGIVNNTVYDPLQPELDSFKEELDKYFKNHTSPDVDLGDISGINASVVNIQKEIDRLNEVAKNLNESLIDLQELGKYEQYIKGSGRENLYFQGGGGSGYIPEAPRDGQAYVRKDGEWVLLSTFLGHHHHHHHH

SEQ ID NO: 5546 - protein, 1281 aa, Artificial Sequence
  Description of Artificial Sequence: Synthetic polypeptide
MGILPSPGMPALLSLVSLLSVLLMGCVAETGTQCVNLTTRTQLPPAYTNSFTRGVYYPDNVFRSSVLHSTQDLFLPFFSNVTWFHAIHVSGTNGTKRFDNPVLPFNDGVYFASTEKSNIIRGWIFGTTLDSKTQSLLIVNNATNVVIKVCEFQFCNDPFLGVYYHKNNKSWMESEFRVYSSANNCTFEYVSQPFLMDLEGKQGNFKNLREFVFKNIDGYFKIYSKHTPINLVRDLPQGFSALEPLVDLPIGINITRFQTLLALHRSYLTPGDSSSGWTAGAAAYYVGYLQPRTFLLKYNENGTITDAVDCALDPLSETKCTLKSFTVEKGIYQTSNFRVQPTESIVRFPNITNLCPFGEVFNATRFASVYAWNRKRISNCVADYSVLYNSASFSTFKCYGVSPTKLNDLCFTNVYADSFVIRGDEVRQIAPGQTGKIADYNYKLPDDFTGCVIAWNSNNLDSKVGGNYNYLYRLFRKSNLKPFERDISTEIYQAGSTPCNGVEGFNCYFPLQSYGFQPTNGVGYQPYRVVVLSFELLHAPATVCGPKKSTNLVKNKCVNFNFNGLTGTGVLTESNKKFLPFQQFGRDIADTTDAVRDPQTLEILDITPCSFGGVSVITPGTNTSNQVAVLYQDVNCTEVPVAIHADQLTPTWRVYSTGSNVFQTRAGCLIGAEHVNNSYECDIPIGAGICASYQTQTNSPSGAGSVASQSIIAYTMSLGAENSVAYSNNSIAIPTNFTISVTTEILPVSMTKTSVDCTMYICGDSTECSNLLLQYGSFCTQLNRALTGIAVEQDKNTQEVFAQVKQIYKTPPIKDFGGFNFSQILPDPSKPSKRSFIEDLLFNKVTLADAGFIKQYGDCLGDIAARDLICAQKFNGLTVLPPLLTDEMIAQYTSALLAGTITSGWTFGAGAALQIPFAMQMAYRFNGIGVTQNVLYENQKLIANQFNSAIGKIQDSLSSTASALGKLQDVVNQNAQALNTLVKQLSSNFGAISSVLNDILSRLDPPEAEVQIDRLITGRLQSLQTYVTQQLIRAAEIRASANLAATKMSECVLGQSKRVDFCGKGYHLMSFPQSAPHGVVFLHVTYVPAQEKNFTTAPAICHDGKAHFPREGVFVSNGTHWFVTQRNFYEPQIITTDNTFVSGNCDVVIGIVNNTVYDPLQPELDSFKEELDKYFKNHTSPDVDLGDISGINASVVNIQKEIDRLNEVAKNLNESLIDLQELGKYEQYIKGSGRENLYFQGGGGSGYIPEAPRDGQAYVRKDGEWVLLSTFLGHHHHHHHH

SEQ ID NO: 5547 - protein, 1281 aa, Artificial Sequence
  Description of Artificial Sequence: Synthetic polypeptide
MGILPSPGMPALLSLVSLLSVLLMGCVAETGTQCVNLTTRTQLPPAYTNSFTRGVYYPDKVFRSSVLHSTQDLFLPFFSNVTWFHAIHVSGTNGTKRFDNPVLPFNDGVYFASTEKSNIIRGWIFGTTLDSKTQSLLIVNNATNVVIKVCEFQFCNDPFLGVYYHKNNKSWMESEFRVYSSANNCTFEYVSQPFLMDLEGKQGNFKNLREFVFKNIDGYFKIYSKHTPINLVRDLPQGFSALEPLVDLPIGINITRFQTLLALHRSYLTPGDSSSGWTAGAAAYYVGYLQPRTFLLKYNENGTITDAVDCALDPLSETKCTLKSFTVEKGIYQTSNFRVQPTESIVRFPNITNLCPFGEVFNATRFASVYAWNRKRISNCVADYSVLYNSASFSTFKCYGVSPTKLNDLCFTNVYADSFVIRGDEVRQIAPGQTGKIADYNYKLPDDFTGCVIAWNSNNLDSKVGGNYNYLYRLFRKSNLKPFERDISTEIYQAGSTPCNGVEGFNCYFPLQSYGFQPTNGVGYQPYRVVVLSFELLHAPATVCGPKKSTNLVKNKCVNFNFNGLTGTGVLTESNKKFLPFQQFGRDIADTTDAVRDPQTLEILDITPCSFGGVSVITPGTNTSNQVAVLYQDVNCTEVPVAIHADQLTPTWRVYSTGSNVFQTRAGCLIGAEHVNNSYECDIPIGAGICASYQTQTNSPSGAGSVASQSIIAYTMSLGAENSVAYSNNSIAIPTNFTISVTTEILPVSMTKTSVDCTMYICGDSTECSNLLLQYGSFCTQLNRALTGIAVEQDKNTQEVFAQVKQIYKTPPIKDFGGFNFSQILPDPSKPSKRSFIEDLLFNKVTLADAGFIKQYGDCLGDIAARDLICAQKFNGLTVLPPLLTDEMIAQYTSALLAGTITSGWTFGAGAALQIPFAMQMAYRFNGIGVTQNVLYENQKLIANQFNSAIGKIQDSLSSTASALGKLQDVVNQNAQALNTLVKQLSSKFGAISSVLNDILSRLDPPEAEVQIDRLITGRLQSLQTYVTQQLIRAAEIRASANLAATKMSECVLGQSKRVDFCGKGYHLMSFPQSAPHGVVFLHVTYVPAQEKNFTTAPAICHDGKAHFPREGVFVSNGTHWFVTQRNFYEPQIITTDNTFVSGNCDVVIGIVNNTVYDPLQPELDSFKEELDKYFKNHTSPDVDLGDISGINASVVNIQKEIDRLNEVAKNLNESLIDLQELGKYEQYIKGSGRENLYFQGGGGSGYIPEAPRDGQAYVRKDGEWVLLSTFLGHHHHHHHH

SEQ ID NO: 5548 - protein, 1281 aa, Artificial Sequence
  Description of Artificial Sequence: Synthetic polypeptide
MGILPSPGMPALLSLVSLLSVLLMGCVAETGTQCVNLTTRTQLPPAYTNSFTRGVYYPDKVFRSSVLHSTQDLFLPFFSNVTWFHAIHVSGTNGTKRFDNPVLPFNDGVYFASTEKSNIIRGWIFGTTLDSKTQSLLIVNNATNVVIKVCEFQFCNDPFLGVYYHKNNKSWMESEFRVYSSANNCTFEYVSQPFLMDLEGKQGNFKNLREFVFKNIDGYFKIYSKHTPINLVRDLPQGFSALEPLVDLPIGINITRFQTLLALHRSYLTPGDSSSGWTAGAAAYYVGYLQPRTFLLKYNENGTITDAVDCALDPLSETKCTLKSFTVEKGIYQTSNFRVQPTESIVRFPNITNLCPFGEVFNATRFASVYAWNRKRISNCVADYSVLYNSASFSTFKCYGVSPTKLNDLCFTNVYADSFVIRGDEVRQIAPGQTGKIADYNYKLPDDFTGCVIAWNSNNLDSKVGGNYNYLYRLFRKSNLKPFERDISGEIYQAGSTPCNGVEGFNCYFPLQSYGFQPTNGVGYQPYRVVVLSFELLHAPATVCGPKKSTNLVKNKCVNFNFNGLTGTGVLTESNKKFLPFQQFGRDIADTTDAVRDPQTLEILDITPCSFGGVSVITPGTNTSNQVAVLYQDVNCTEVPVAIHADQLTPTWRVYSTGSNVFQTRAGCLIGAEHVNNSYECDIPIGAGICASYQTQTNSPSGAGSVASQSIIAYTMSLGAENSVAYSNNSIAIPTNFTISVTTEILPVSMTKTSVDCTMYICGDSTECSNLLLQYGSFCTQLNRALTGIAVEQDKNTQEVFAQVKQIYKTPPIKDFGGFNFSQILPDPSKPSKRSFIEDLLFNKVTLADAGFIKQYGDCLGDIAARDLICAQKFNGLTVLPPLLTDEMIAQYTSALLAGTITSGWTFGAGAALQIPFAMQMAYRFNGIGVTQNVLYENQKLIANQFNSAIGKIQDSLSSTASALGKLQDVVNQNAQALNTLVKQLSSNFGAISSVLNDILSRLDPPEAEVQIDRLITGRLQSLQTYVTQQLIRAAEIRASANLAATKMSECVLGQSKRVDFCGKGYHLMSFPQSAPHGVVFLHVTYVPAQEKNFTTAPAICHDGKAHFPREGVFVSNGTHWFVTQRNFYEPQIITTDNTFVSGNCDVVIGIVNNTVYDPLQPELDSFKEELDKYFKNHTSPDVDLGDISGINASVVNIQKEIDRLNEVAKNLNESLIDLQELGKYEQYIKGSGRENLYFQGGGGSGYIPEAPRDGQAYVRKDGEWVLLSTFLGHHHHHHHH

SEQ ID NO: 5549 - protein, 1281 aa, Artificial Sequence
  Description of Artificial Sequence: Synthetic polypeptide
MGILPSPGMPALLSLVSLLSVLLMGCVAETGTQCVNLTTRTQLPPAYTNSFTRGVYYPDKVFRSSVLHSTQDLFLPFFSNVTWFHAIHVSGTNGTKRFDNPVLPFNDGVYFASTEKSNIIRGWIFGTTLDSKTQSLLIVNNATNVVIKVCEFQFCNDPFLGVYYHKNNKSWMESEFRVYSSANNCTFEYVSQPFLMDLEGKQGNFKNLREFVFKNIDGYFKIYSKHTPINLVRDLPQGFSALEPLVDLPIGINITRFQTLLALHRSYLTPGDSSSGWTAGAAAYYVGYLQPRTFLLKYNENGTITDAVDCALDPLSETKCTLKSFTVEKGIYQTSNFRVQPTESIVRFPNITNLCPFGEVFNATRFASVYAWNRKRISNCVADYSVLYNSASFSTFKCYGVSPTKLNDLCFTNVYADSFVIRGDEVRQIAPGQTGKIADYNYKLPDDFTGCVIAWNSNNLDSKVGGNYNYLYRLFRKSNLKPFERDISTEIYQAGSTPCNGVEGFNCYFPLQSYGFQPTNGVGYQPYRVVVLSFELLHAPATVCGPKKSTNLVKNKCVNFNFNGLTGTGVLTESNKKFLPFQQFGRDIADTTDAVRDPQTLEILDITPCSFGGVSVITPGTNTSNQVAVLYQDVNCTEVPVAIHADQLTPTWRVYSTGSNVFQTRAGCLIGAEHVNNSYECDIPIGAGICASYQTQTNSPSGAGSVASQSIIAYTMSLGAENSVAYSNNSIAIPTNFTISVTTEILPVSMTKTSVDCTMYICGDSTECSNLLLQYGSFCTQLNRALTGIAVEQDKNTQEVFAQVKQIYKTPPIKDFGGFNFSQILPDPSKPSKRSFIEDLLFNKVTLADAGFIKQYGDCLGDIAARDLICAQKFNGLTVLPPLLTDEMIAQYTSALLAGTITSGWTFGAGAALIIPFAMQMAYRFNGIGVTQNVLYENQKLIANQFNSAIGKIQDSLSSTASALGKLQDVVNQNAQALNTLVKQLSSNFGAISSVLNDILSRLDPPEAEVQIDRLITGRLQSLQTYVTQQLIRAAEIRASANLAATKMSECVLGQSKRVDFCGKGYHLMSFPQSAPHGVVFLHVTYVPAQEKNFTTAPAICHDGKAHFPREGVFVSNGTHWFVTQRNFYEPQIITTDNTFVSGNCDVVIGIVNNTVYDPLQPELDSFKEELDKYFKNHTSPDVDLGDISGINASVVNIQKEIDRLNEVAKNLNESLIDLQELGKYEQYIKGSGRENLYFQGGGGSGYIPEAPRDGQAYVRKDGEWVLLSTFLGHHHHHHHH

SEQ ID NO: 5550 - protein, 1281 aa, Artificial Sequence
  Description of Artificial Sequence: Synthetic polypeptide
MGILPSPGMPALLSLVSLLSVLLMGCVAETGTQCVNLTTRTQLPPAYTNSFTRGVYYPDKVFRSSVLHSTQDLFLPFFSNVTWFHAIHVSGTNGTKRFDNPVLPFNDGVYFASTEKSNIIRGWIFGTTLDSKTQSLLIVNNATNVVIKVCEFQFCNDPFLGVYYHKNNKSWMESEFRVYSSANNCTFEYVSQPFLMDLEGKQGNFKNLREFVFKNIDGYFKIYSKHTPINLVRDLPQGFSALEPLVDLPIGINITRFQTLLALHRSYLTPGDSSSGWTAGAAAYYVGYLQPRTFLLKYNENGTITDAVDCALDPLSETKCTLKSFTVEKGIYQTSNFRVQPTESIVRFPNITNLCPFGEVFNATRFASVYAWNRKRISNCVADYSVLYNSASFSTFKCYGVSPTKLNDLCFTNVYADSFVIRGDEVRQIAPGQTGKIADYNYKLPDDFTGCVIAWNSNNLDSKVGGNYNYLYRLFRKSNLKPFERDISTEIYQAGSTPCNGVEGFNCYFPLQSYGFQPTNGVGYQPYRVVVLSFELLHAPATVCGPRKSTNLVKNKCVNFNFNGLTGTGVLTESNKKFLPFQQFGRDIADTTDAVRDPQTLEILDITPCSFGGVSVITPGTNTSNQVAVLYQDVNCTEVPVAIHADQLTPTWRVYSTGSNVFQTRAGCLIGAEHVNNSYECDIPIGAGICASYQTQTNSPSGAGSVASQSIIAYTMSLGAENSVAYSNNSIAIPTNFTISVTTEILPVSMTKTSVDCTMYICGDSTECSNLLLQYGSFCTQLNRALTGIAVEQDKNTQEVFAQVKQIYKTPPIKDFGGFNFSQILPDPSKPSKRSFIEDLLFNKVTLADAGFIKQYGDCLGDIAARDLICAQKFNGLTVLPPLLTDEMIAQYTSALLAGTITSGWTFGAGAALQIPFAMQMAYRFNGIGVTQNVLYENQKLIANQFNSAIGKIQDSLSSTASALGKLQDVVNQNAQALNTLVKQLSSNFGAISSVLNDILSRLDPPEAEVQIDRLITGRLQSLQTYVTQQLIRAAEIRASANLAATKMSECVLGQSKRVDFCGKGYHLMSFPQSAPHGVVFLHVTYVPAQEKNFTTAPAICHDGKAHFPREGVFVSNGTHWFVTQRNFYEPQIITTDNTFVSGNCDVVIGIVNNTVYDPLQPELDSFKEELDKYFKNHTSPDVDLGDISGINASVVNIQKEIDRLNEVAKNLNESLIDLQELGKYEQYIKGSGRENLYFQGGGGSGYIPEAPRDGQAYVRKDGEWVLLSTFLGHHHHHHHH

SEQ ID NO: 5551 - protein, 1281 aa, Artificial Sequence
  Description of Artificial Sequence: Synthetic polypeptide
MGILPSPGMPALLSLVSLLSVLLMGCVAETGTQCVNLTTRTQLPPAYTNSFTRGVYYPDKVFRSSVLHSTQDLFLPFFSNVTWFHAIHVSGTNGTKRFDNPVLPFNDGVYFASTEKSNIIRGWIFGTTLDSKTQSLLIVNNATNVVIKVCEFQFCNDPFLGVYYHKNNKSWMESEFRVYSSANNCTFEYVSQPFLMDLEGKQGNFKNLREFVFKNIDGYFKIYSKHTPINLVRDLPQGFSALEPLVDLPIGINITRFQTLLALHRSYLTPGDSSSGWTAGAAAYYVGYLQPRTFLLKYNENGTITDAVDCALDPLSETKCTLKSFTVEKGIYQTSNFRVQPTESIVRFPNITNLCPFGEVFNATRFASVYAWNRKRISNCVADYSVLYNSASFSTFKCYGVSPTKLNDLCFTNVYADSFVIRGDEVRQIAPGQTGKIADYNYKLPDDFTGCVIAWNSNNLDSKVGGNYNYLYRLFRKSNLNPFERDISTEIYQAGSTPCNGVEGFNCYFPLQSYGFQPTNGVGYQPYRVVVLSFELLHAPATVCGPKKSTNLVKNKCVNFNFNGLTGTGVLTESNKKFLPFQQFGRDIADTTDAVRDPQTLEILDITPCSFGGVSVITPGTNTSNQVAVLYQDVNCTEVPVAIHADQLTPTWRVYSTGSNVFQTRAGCLIGAEHVNNSYECDIPIGAGICASYQTQTNSPSGAGSVASQSIIAYTMSLGAENSVAYSNNSIAIPTNFTISVTTEILPVSMTKTSVDCTMYICGDSTECSNLLLQYGSFCTQLNRALTGIAVEQDKNTQEVFAQVKQIYKTPPIKDFGGFNFSQILPDPSKPSKRSFIEDLLFNKVTLADAGFIKQYGDCLGDIAARDLICAQKFNGLTVLPPLLTDEMIAQYTSALLAGTITSGWTFGAGAALQIPFAMQMAYRFNGIGVTQNVLYENQKLIANQFNSAIGKIQDSLSSTASALGKLQDVVNQNAQALNTLVKQLSSNFGAISSVLNDILSRLDPPEAEVQIDRLITGRLQSLQTYVTQQLIRAAEIRASANLAATKMSECVLGQSKRVDFCGKGYHLMSFPQSAPHGVVFLHVTYVPAQEKNFTTAPAICHDGKAHFPREGVFVSNGTHWFVTQRNFYEPQIITTDNTFVSGNCDVVIGIVNNTVYDPLQPELDSFKEELDKYFKNHTSPDVDLGDISGINASVVNIQKEIDRLNEVAKNLNESLIDLQELGKYEQYIKGSGRENLYFQGGGGSGYIPEAPRDGQAYVRKDGEWVLLSTFLGHHHHHHHH

SEQ ID NO: 5552 - protein, 1281 aa, Artificial Sequence
  Description of Artificial Sequence: Synthetic polypeptide
MGILPSPGMPALLSLVSLLSVLLMGCVAETGTQCVNLTTRTQLPPAYTNSFTRGVYYPDKVFRSSVLHSTQDLFLPFFSNVTWFHAIHVSGTNGTKRFDNPVLPFNDGVYFASTEKSNIIRGWIFGTTLDSKTQSLLIVNNATNVVIKVCEFQFCNDPFLGVYYHKNNKSWMESEFRVYSSANNCTFEYVSQPFLMDLEGKQGNFKNLREFVFKNIDGYFKIYSKHTPINLVRDLPQGFSALEPLVDLPIGINITRFQTLLALHRSYLTPGDSSSGWTAGAAAYYVGYLQPRTFLLKYNENGTITDAVDCALDPLSETKCTLKSFTVEKGIYQTSNFRVQPTESIVRFPNITNLCPFGEVFNATRFASVYAWNRKRISNCVADYSVLYNSASFSTFKCYGVSPTKLNDLCFTNVYADSFVIRGDEVKQIAPGQTGKIADYNYKLPDDFTGCVIAWNSNNLDSKVGGNYNYLYRLFRKSNLKPFERDISTEIYQAGSTPCNGVEGFNCYFPLQSYGFQPTNGVGYQPYRVVVLSFELLHAPATVCGPKKSTNLVKNKCVNFNFNGLTGTGVLTESNKKFLPFQQFGRDIADTTDAVRDPQTLEILDITPCSFGGVSVITPGTNTSNQVAVLYQDVNCTEVPVAIHADQLTPTWRVYSTGSNVFQTRAGCLIGAEHVNNSYECDIPIGAGICASYQTQTNSPSGAGSVASQSIIAYTMSLGAENSVAYSNNSIAIPTNFTISVTTEILPVSMTKTSVDCTMYICGDSTECSNLLLQYGSFCTQLNRALTGIAVEQDKNTQEVFAQVKQIYKTPPIKDFGGFNFSQILPDPSKPSKRSFIEDLLFNKVTLADAGFIKQYGDCLGDIAARDLICAQKFNGLTVLPPLLTDEMIAQYTSALLAGTITSGWTFGAGAALQIPFAMQMAYRFNGIGVTQNVLYENQKLIANQFNSAIGKIQDSLSSTASALGKLQDVVNQNAQALNTLVKQLSSNFGAISSVLNDILSRLDPPEAEVQIDRLITGRLQSLQTYVTQQLIRAAEIRASANLAATKMSECVLGQSKRVDFCGKGYHLMSFPQSAPHGVVFLHVTYVPAQEKNFTTAPAICHDGKAHFPREGVFVSNGTHWFVTQRNFYEPQIITTDNTFVSGNCDVVIGIVNNTVYDPLQPELDSFKEELDKYFKNHTSPDVDLGDISGINASVVNIQKEIDRLNEVAKNLNESLIDLQELGKYEQYIKGSGRENLYFQGGGGSGYIPEAPRDGQAYVRKDGEWVLLSTFLGHHHHHHHH

SEQ ID NO: 5553 - protein, 1281 aa, Artificial Sequence
  Description of Artificial Sequence: Synthetic polypeptide
MGILPSPGMPALLSLVSLLSVLLMGCVAETGTQCVNLTTRTQLPPAYTNSFTRGVYYPDKVFRSSVLHSTQDLFLPFFSNVTWFHAIHVSGTNGTKRFDNPVLPFNDGVYFASTEKSNIIRGWIFGTTLDSKTQSLLIVNNATNVVIKVCEFQFCNDPFLGVYYHKNNKSWMESEFRVYSSANNCTFEYVSQPFLMDLEGKQGNFKNLREFVFKNIDGYFKIYSKHTPINLVRDLPQGFSALEPLVDLPIGINITRFQTLLALHRSYLTPGDSSSGWTAGAAAYYVGYLQPRTFLLKYNENGTITDAVDCALDPLSETKCTLKSFTVEKGIYQTSNFRVQPTESIVRFPNITNLCPFGEVFNATRFASVYAWNRKRITNCVADYSVLYNSASFSTFKCYGVSPTKLNDLCFTNVYADSFVIRGDEVRQIAPGQTGKIADYNYKLPDDFTGCVIAWNSNNLDSKVGGNYNYLYRLFRKSNLKPFERDISTEIYQAGSTPCNGVEGFNCYFPLQSYGFQPTNGVGYQPYRVVVLSFELLHAPATVCGPKKSTNLVKNKCVNFNFNGLTGTGVLTESNKKFLPFQQFGRDIADTTDAVRDPQTLEILDITPCSFGGVSVITPGTNTSNQVAVLYQDVNCTEVPVAIHADQLTPTWRVYSTGSNVFQTRAGCLIGAEHVNNSYECDIPIGAGICASYQTQTNSPSGAGSVASQSIIAYTMSLGAENSVAYSNNSIAIPTNFTISVTTEILPVSMTKTSVDCTMYICGDSTECSNLLLQYGSFCTQLNRALTGIAVEQDKNTQEVFAQVKQIYKTPPIKDFGGFNFSQILPDPSKPSKRSFIEDLLFNKVTLADAGFIKQYGDCLGDIAARDLICAQKFNGLTVLPPLLTDEMIAQYTSALLAGTITSGWTFGAGAALQIPFAMQMAYRFNGIGVTQNVLYENQKLIANQFNSAIGKIQDSLSSTASALGKLQDVVNQNAQALNTLVKQLSSNFGAISSVLNDILSRLDPPEAEVQIDRLITGRLQSLQTYVTQQLIRAAEIRASANLAATKMSECVLGQSKRVDFCGKGYHLMSFPQSAPHGVVFLHVTYVPAQEKNFTTAPAICHDGKAHFPREGVFVSNGTHWFVTQRNFYEPQIITTDNTFVSGNCDVVIGIVNNTVYDPLQPELDSFKEELDKYFKNHTSPDVDLGDISGINASVVNIQKEIDRLNEVAKNLNESLIDLQELGKYEQYIKGSGRENLYFQGGGGSGYIPEAPRDGQAYVRKDGEWVLLSTFLGHHHHHHHH

SEQ ID NO: 5554 - protein, 1281 aa, Artificial Sequence
  Description of Artificial Sequence: Synthetic polypeptide
MGILPSPGMPALLSLVSLLSVLLMGCVAETGTQCVNLTTRTQLPPAYTNSFTRGVYYPDKVFRSSVLHSTQDLFLPFFSNVTWFHAIHVSGTNGTKRFDNPVLPFNDGVYFASTEKSNIIRGWIFGTTLDSKTQSLLIVNNATNVVIKVCEFQFCNDPFLGVYYHKNNKSWMESEFRVYSSANNCTFEYVSQPFLMDLEGKQGNFKNLREFVFKNIDGYFKIYSKHTPINLVRDLPQGFSALEPLVDLPIGINITRFQTLLALHRSYLTPGDSSSGWTAGAAAYYVGYLQPRTFLLKYNENGTITDAVDCALDPLSETKCTLKSFTVEKGIYQTSNFRVQPTESIVRFPNITNLCPFGEVFNATRFASVYAWNRKRISNCVADYSVLYNSASFSTFKCYGVSPTKLNDLCFTNVYADSFVIRGDEVRQIAPGQTGKIADYNYKLPDDFTGCVIAWNSNNLDSKVGGNYNYLYRLFRKSNLKPFERDITTEIYQAGSTPCNGVEGFNCYFPLQSYGFQPTNGVGYQPYRVVVLSFELLHAPATVCGPKKSTNLVKNKCVNFNFNGLTGTGVLTESNKKFLPFQQFGRDIADTTDAVRDPQTLEILDITPCSFGGVSVITPGTNTSNQVAVLYQDVNCTEVPVAIHADQLTPTWRVYSTGSNVFQTRAGCLIGAEHVNNSYECDIPIGAGICASYQTQTNSPSGAGSVASQSIIAYTMSLGAENSVAYSNNSIAIPTNFTISVTTEILPVSMTKTSVDCTMYICGDSTECSNLLLQYGSFCTQLNRALTGIAVEQDKNTQEVFAQVKQIYKTPPIKDFGGFNFSQILPDPSKPSKRSFIEDLLFNKVTLADAGFIKQYGDCLGDIAARDLICAQKFNGLTVLPPLLTDEMIAQYTSALLAGTITSGWTFGAGAALQIPFAMQMAYRFNGIGVTQNVLYENQKLIANQFNSAIGKIQDSLSSTASALGKLQDVVNQNAQALNTLVKQLSSNFGAISSVLNDILSRLDPPEAEVQIDRLITGRLQSLQTYVTQQLIRAAEIRASANLAATKMSECVLGQSKRVDFCGKGYHLMSFPQSAPHGVVFLHVTYVPAQEKNFTTAPAICHDGKAHFPREGVFVSNGTHWFVTQRNFYEPQIITTDNTFVSGNCDVVIGIVNNTVYDPLQPELDSFKEELDKYFKNHTSPDVDLGDISGINASVVNIQKEIDRLNEVAKNLNESLIDLQELGKYEQYIKGSGRENLYFQGGGGSGYIPEAPRDGQAYVRKDGEWVLLSTFLGHHHHHHHH

SEQ ID NO: 5555 - protein, 1281 aa, Artificial Sequence
  Description of Artificial Sequence: Synthetic polypeptide
MGILPSPGMPALLSLVSLLSVLLMGCVAETGTQCVNLTTRTQLPPAYTNSFTRGVYYPDKVFRSSVLHSTQDLFLPFFSNVTWFHAIHVSGTNGTKRFDNPVLPFNDGVYFASTEKSNIIRGWIFGTTLDSKTQSLLIVNNATNVVIKVCEFQFCNDPFLGVYYHKNNKSWMESEFRVYSSANNCTFEYVSQPFLMDLEGKQGNFKNLREFVFKNIDGYFKIYSKHTPINLVRDLPQGFSALEPLVDLPIGINITRFQTLLALHRSYLTPGDSSSGWTAGAAAYYVGYLQPRTFLLKYNENGTITDAVDCALDPLSETKCTLKSFTVEKGIYQTSNFRVQPTESIVRFPNITNLCPFGEVFNATRFASVYAWNRKRISNCVADYSVLYNSASFSTFKCYGVSPTKLNDLCFTNVYADSFVIRGDEVRQIAPGQTGKIADYNYKLPDDFTGCVIAWNSNNLDSKVGGNYNYLYRLFRKSNLKPFERDISTEIYQAGSTPCNGVEGFNCYFPLQSYGFQPTNGVGYQPYRVVVLSFELLHAPATVCGPKKSTNLVKNKCVNFNFNGLTGTGVLTESNKKFLPFQQFGRDIADTTDAVRDPQTLEILDITPCSFGGVSVITPGTNTSNQVAVLYQDVNCTEVPVAIHADQLTPTWRVYSTGSNVFQTRAGCLIGAEHVNNSYECDIPIGAGICASYQTQTNSPSGAGSVASQSIIAYTMSLGAENSVAYSNNSIAIPTNFTISVTTEILPVSMTKTSVDCTMYICGDSTECSNLLLQYGSFCTQLNRALTGIAVEQDKNTQEVFAQVKQIYKTPPIKDFGGFNFSQILPDPSKPSKRSFIEDLLFNKVTLADAGFIKQYGDCLGDIAARDLICAQKFNGLTVLPPLLTDEMIAQYTSALLAGTITSGWTFGAGAALQIPFAMQMAYRFNGIGVTQNVLYENQKLIANQFNSAIGKIQDSLSSTASALGKLQDVVNQNAQALNTLVKQLSSNFGAISSVLNDILSRIDPPEAEVQIDRLITGRLQSLQTYVTQQLIRAAEIRASANLAATKMSECVLGQSKRVDFCGKGYHLMSFPQSAPHGVVFLHVTYVPAQEKNFTTAPAICHDGKAHFPREGVFVSNGTHWFVTQRNFYEPQIITTDNTFVSGNCDVVIGIVNNTVYDPLQPELDSFKEELDKYFKNHTSPDVDLGDISGINASVVNIQKEIDRLNEVAKNLNESLIDLQELGKYEQYIKGSGRENLYFQGGGGSGYIPEAPRDGQAYVRKDGEWVLLSTFLGHHHHHHHH

SEQ ID NO: 5556 - protein, 1281 aa, Artificial Sequence
  Description of Artificial Sequence: Synthetic polypeptide
MGILPSPGMPALLSLVSLLSVLLMGCVAETGTQCVNLTTRTQLPPAYTNSFTRGVYYPDKVFRSSVLHSTQDLFLPFFSNVTWFHAIHVSGTNGTKRFDNPVLPFNDGVYFASTEKSNIIRGWIFGTTLDSKTQSLLIVNNATNVVIKVCEFQFCNDPFLGVYYHKNNKSWMESEFRVYSSANNCTFEYVSQPFLMDLEGKQGNFKNLREFVFKNIDGYFKIYSKHTPINLVRDLPQGFSALEPLVDLPIGINITRFQTLLALHRSYLTPGDSSSGWTAGAAAYYVGYLQPRTFLLKYNENGTITDAVDCALDPLSETKCTLKSFTVEKGIYQTSNFRVQPTESIVRFPNITNLCPFGEVFNATRFASVYAWNRKRISNCVADYSSLYNSASFSTFKCYGVSPTKLNDLCFTNVYADSFVIRGDEVRQIAPGQTGKIADYNYKLPDDFTGCVIAWNSNNLDSKVGGNYNYLYRLFRKSNLKPFERDISTEIYQAGSTPCNGVEGFNCYFPLQSYGFQPTNGVGYQPYRVVVLSFELLHAPATVCGPKKSTNLVKNKCVNFNFNGLTGTGVLTESNKKFLPFQQFGRDIADTTDAVRDPQTLEILDITPCSFGGVSVITPGTNTSNQVAVLYQDVNCTEVPVAIHADQLTPTWRVYSTGSNVFQTRAGCLIGAEHVNNSYECDIPIGAGICASYQTQTNSPSGAGSVASQSIIAYTMSLGAENSVAYSNNSIAIPTNFTISVTTEILPVSMTKTSVDCTMYICGDSTECSNLLLQYGSFCTQLNRALTGIAVEQDKNTQEVFAQVKQIYKTPPIKDFGGFNFSQILPDPSKPSKRSFIEDLLFNKVTLADAGFIKQYGDCLGDIAARDLICAQKFNGLTVLPPLLTDEMIAQYTSALLAGTITSGWTFGAGAALQIPFAMQMAYRFNGIGVTQNVLYENQKLIANQFNSAIGKIQDSLSSTASALGKLQDVVNQNAQALNTLVKQLSSNFGAISSVLNDILSRLDPPEAEVQIDRLITGRLQSLQTYVTQQLIRAAEIRASANLAATKMSECVLGQSKRVDFCGKGYHLMSFPQSAPHGVVFLHVTYVPAQEKNFTTAPAICHDGKAHFPREGVFVSNGTHWFVTQRNFYEPQIITTDNTFVSGNCDVVIGIVNNTVYDPLQPELDSFKEELDKYFKNHTSPDVDLGDISGINASVVNIQKEIDRLNEVAKNLNESLIDLQELGKYEQYIKGSGRENLYFQGGGGSGYIPEAPRDGQAYVRKDGEWVLLSTFLGHHHHHHHH

SEQ ID NO: 5557 - protein, 1281 aa, Artificial Sequence
  Description of Artificial Sequence: Synthetic polypeptide
MGILPSPGMPALLSLVSLLSVLLMGCVAETGTQCVNLTTRTQLPPAYTNSFTRGVYYPDKVFRSSVLHSTQDLFLPFFSNVTWFHAIHVSGTNGTKRFDNPVLPFNDGVYFASTEKSNIIRGWIFGTTLDSKTQSLLIVNNATNVVIKVCEFQFCNDPFLGVYYHKNNKSWMESEFRVYSSANNCTFEYVSQPFLMDLEGKQGNFKNLREFVFKNIDGYFKIYSKHTPINLVRDLPQGFSALEPLVDLPIGINITRFQTLLALHRSYLTPGDSSSGWTAGAAAYYVGYLQPRTFLLKYNENGTITDAVDCALDPLSETKCTLKSFTVEKGIYQTSNFRVQPTESIVRFPNITNLCPFGEVFNATRFASVYAWNRKRISNCVADYSVLYNSASFSTFKCYGVSPTKLNDLCFTNVYADSFVIRGDEVRQIAPGQTGKIADYNYKLPDDFTGCVIAWNSNQLDSKVGGNYNYLYRLFRKSNLKPFERDISTEIYQAGSTPCNGVEGFNCYFPLQSYGFQPTNGVGYQPYRVVVLSFELLHAPATVCGPKKSTNLVKNKCVNFNFNGLTGTGVLTESNKKFLPFQQFGRDIADTTDAVRDPQTLEILDITPCSFGGVSVITPGTNTSNQVAVLYQDVNCTEVPVAIHADQLTPTWRVYSTGSNVFQTRAGCLIGAEHVNNSYECDIPIGAGICASYQTQTNSPSGAGSVASQSIIAYTMSLGAENSVAYSNNSIAIPTNFTISVTTEILPVSMTKTSVDCTMYICGDSTECSNLLLQYGSFCTQLNRALTGIAVEQDKNTQEVFAQVKQIYKTPPIKDFGGFNFSQILPDPSKPSKRSFIEDLLFNKVTLADAGFIKQYGDCLGDIAARDLICAQKFNGLTVLPPLLTDEMIAQYTSALLAGTITSGWTFGAGAALQIPFAMQMAYRFNGIGVTQNVLYENQKLIANQFNSAIGKIQDSLSSTASALGKLQDVVNQNAQALNTLVKQLSSNFGAISSVLNDILSRLDPPEAEVQIDRLITGRLQSLQTYVTQQLIRAAEIRASANLAATKMSECVLGQSKRVDFCGKGYHLMSFPQSAPHGVVFLHVTYVPAQEKNFTTAPAICHDGKAHFPREGVFVSNGTHWFVTQRNFYEPQIITTDNTFVSGNCDVVIGIVNNTVYDPLQPELDSFKEELDKYFKNHTSPDVDLGDISGINASVVNIQKEIDRLNEVAKNLNESLIDLQELGKYEQYIKGSGRENLYFQGGGGSGYIPEAPRDGQAYVRKDGEWVLLSTFLGHHHHHHHH

SEQ ID NO: 5558 - protein, 1281 aa, Artificial Sequence
  Description of Artificial Sequence: Synthetic polypeptide
MGILPSPGMPALLSLVSLLSVLLMGCVAETGTQCVNLTTRTQLPPAYTNSFTRGVYYPDKVFRSSVLHSTQDLFLPFFSNVTWFHAIHVSGTNGTKRFDNPVLPFNDGVYFASTEKSNIIRGWIFGTTLDSKTQSLLIVNNATNVVIKVCEFQFCNDPFLGVYYHKNNKSWMESEFRVYSSANNCTFEYVSQPFLMDLEGKQGNFKNLREFVFKNIDGYFKIYSKHTPINLVRDLPQGFSALEPLVDLPIGINITRFQTLLALHRSYLTPGDSSSGWTAGAAAYYVGYLQPRTFLLKYNENGTITDAVDCALDPLSETKCTLKSFTVEKGIYQTSNFRVQPTESIVRFPNITNLCPFGEVFNATRFASVYAWNRKRISNCVADYSVLYNSASFSTFKCYGVSPTKLNDLCFTNVYADSFVIRGDEVRQIAPGQTGKIADYNYKLPDDFTGCVIAWNSNNLDSKVGGNYNYLYRLFRKSNLKPFERDISTEIYQAGSTPCNGVEGFNCYFPLQSYGFQPTNGVGYQPYRVVVLSFELLHAPATVCGPKKSTNLVKNKCVNFNFNGLTGTGVLTESNKKFLPFQQFGRDIADTTDAVRDPQTLEILDITPCSFGGVSVITPGTNTSNQVAVLYQDVNCTEVPVAIHADQLTPTWRVYSTGSNVFQTRAGCLIGAEHVNNSYECDIPIGAGICASYQTQTNSPSGAGSVASQSIIAYTMSLGAENSVAYSNNSIAIPTNFTISVTTEILPVSMTKTSVDCTMYICGDSTECSNLLLQYGSFCTQLNRALTGIAVEQDKNTQEVFAQVKQIYKTPPIKDFGGFNFSQILPDPSKPSKRSFIEDLLFNKVTLADAGFIKQYGDCLGDIAARDLICAQKFNGLTVLPPLLTDEMIAQYTSALLAGTITSGWTFGAGAALQIPFAMQMAYRFNGIGVTQNVLYENQKLIANQFNSAIGKIQDSLSSTASALGKLQDVVNQNAQALNTLVKQLSYNFGAISSVLNDILSRLDPPEAEVQIDRLITGRLQSLQTYVTQQLIRAAEIRASANLAATKMSECVLGQSKRVDFCGKGYHLMSFPQSAPHGVVFLHVTYVPAQEKNFTTAPAICHDGKAHFPREGVFVSNGTHWFVTQRNFYEPQIITTDNTFVSGNCDVVIGIVNNTVYDPLQPELDSFKEELDKYFKNHTSPDVDLGDISGINASVVNIQKEIDRLNEVAKNLNESLIDLQELGKYEQYIKGSGRENLYFQGGGGSGYIPEAPRDGQAYVRKDGEWVLLSTFLGHHHHHHHH

SEQ ID NO: 5559 - protein, 1281 aa, Artificial Sequence
  Description of Artificial Sequence: Synthetic polypeptide
MGILPSPGMPALLSLVSLLSVLLMGCVAETGTQCVNLTTRTQLPPAYTNSFTRGVYYPDKVFRSSVLHSTQDLFLPFFSNVTWFHAIHVSGTNGTKRFDNPVLPFNDGVYFASTEKSNIIRGWIFGTTLDSKTQSLLIVNNATNVVIKVCEFQFCNDPFLGVYYHKNNKSWMESEFRVYSSANNCTFEYVSQPFLMDLEGKQGNFKNLREFVFKNIDGYFKIYSKHTPINLVRDLPQGFSALEPLVDLPIGINITRFQTLLALHRSYLTPGDSSSGWTAGAAAYYVGYLQPRTFLLKYNENGTITDAVDCALDPLSETKCTLKSFTVEKGIYQTSNFRVQPTESIVRFPNITNLCPFGEVFNATRFASVYAWNRKRISNCVADYSVLYNSASFSTFKCYGVSPTKLNDLCFTNVYADSFVIRGDEVRQIAPGQTGKIADYNYKLPDDFTGCVIAWNSNNLDSKVGGNYNYLYRLFRKSNLKPFERDISREIYQAGSTPCNGVEGFNCYFPLQSYGFQPTNGVGYQPYRVVVLSFELLHAPATVCGPKKSTNLVKNKCVNFNFNGLTGTGVLTESNKKFLPFQQFGRDIADTTDAVRDPQTLEILDITPCSFGGVSVITPGTNTSNQVAVLYQDVNCTEVPVAIHADQLTPTWRVYSTGSNVFQTRAGCLIGAEHVNNSYECDIPIGAGICASYQTQTNSPSGAGSVASQSIIAYTMSLGAENSVAYSNNSIAIPTNFTISVTTEILPVSMTKTSVDCTMYICGDSTECSNLLLQYGSFCTQLNRALTGIAVEQDKNTQEVFAQVKQIYKTPPIKDFGGFNFSQILPDPSKPSKRSFIEDLLFNKVTLADAGFIKQYGDCLGDIAARDLICAQKFNGLTVLPPLLTDEMIAQYTSALLAGTITSGWTFGAGAALQIPFAMQMAYRFNGIGVTQNVLYENQKLIANQFNSAIGKIQDSLSSTASALGKLQDVVNQNAQALNTLVKQLSSNFGAISSVLNDILSRLDPPEAEVQIDRLITGRLQSLQTYVTQQLIRAAEIRASANLAATKMSECVLGQSKRVDFCGKGYHLMSFPQSAPHGVVFLHVTYVPAQEKNFTTAPAICHDGKAHFPREGVFVSNGTHWFVTQRNFYEPQIITTDNTFVSGNCDVVIGIVNNTVYDPLQPELDSFKEELDKYFKNHTSPDVDLGDISGINASVVNIQKEIDRLNEVAKNLNESLIDLQELGKYEQYIKGSGRENLYFQGGGGSGYIPEAPRDGQAYVRKDGEWVLLSTFLGHHHHHHHH

SEQ ID NO: 5560 - protein, 1281 aa, Artificial Sequence
  Description of Artificial Sequence: Synthetic polypeptide
MGILPSPGMPALLSLVSLLSVLLMGCVAETGTQCVNLTTRTQLPPAYTNSFTRGVYYPDKVFRSSVLHSTQDLFLPFFSNVTWFHAIHVSGTNGTKRFDNPVLPFNDGVYFASTEKSNIIRGWIFGTTLDSKTQSLLIVNNATNVVIKVCEFQFCNDPFLGVYYHKNNKSWMESEFRVYSSANNCTFEYVSQPFLMDLEGKQGNFKNLREFVFKNIDGYFKIYSKHTPINLVRDLPQGFSALEPLVDLPIGINITRFQTLLALHRSYLTPGDSSSGWTAGAAAYYVGYLQPRTFLLKYNENGTITDAVDCALDPLSETKCTLKSFTVEKGIYQTSNFRVQPTESIVRFPNITNLCPFGEVFNATRFASVYAWNRKRISNCVADYSVLYNSASFSTFKCYGVSPTKLNDLCFTNVYADSFVIRGDEVRQIAPGQTGKIADYNYKLPDDFTGCVIAWNSNNLDSKVGGNYNYLYRLFRKSNLKPFERDISTEIYQAGSTPCNGVEGFNCYFPLQSYGFQPTNGVGYQPYRVVVLSFELLHAPATVCGPKKSTNLVKNKCVNFNFNGLTGTGVLTESNKKFLPFQQFGRDIADTTDAVRDPQTLEILDITPCSFGGVSVITPGTNTSNQVAVLYQDVNCTEVPVAIHADQLTPTWRVYSTGSNVFQTRAGCLIGAEHVNNSYECDIPIGAGICASYQTQTNSPSGAGSVASQSIIAYTMSLGAENSVAYSNNSIAIPTNFTISVTTEILPVSMTKTSVDCTMYICGDSTECSNLLLQYGSFCTQLNRALTGIAVEQDKNTQEVFAQVKQIYKTPPIKDFGGFNFSQILPDPSKPSKRSFIEDLLFNKVTLADAGFIKQYGDCLGDIAARDLICAQKFNGLTVLPPLLTDEMIAQYTSALLAGTITSGWTFGAGAALQIPFAMQMAYRFNGIGVTQNVLYENQKLIANQFNSAIGKIQDSLSSTASALGKLQDVVNQNAQALNTLVKQLSSNFGAISSVLWDILSRLDPPEAEVQIDRLITGRLQSLQTYVTQQLIRAAEIRASANLAATKMSECVLGQSKRVDFCGKGYHLMSFPQSAPHGVVFLHVTYVPAQEKNFTTAPAICHDGKAHFPREGVFVSNGTHWFVTQRNFYEPQIITTDNTFVSGNCDVVIGIVNNTVYDPLQPELDSFKEELDKYFKNHTSPDVDLGDISGINASVVNIQKEIDRLNEVAKNLNESLIDLQELGKYEQYIKGSGRENLYFQGGGGSGYIPEAPRDGQAYVRKDGEWVLLSTFLGHHHHHHHH

SEQ ID NO: 5561 - protein, 1281 aa, Artificial Sequence
  Description of Artificial Sequence: Synthetic polypeptide
MGILPSPGMPALLSLVSLLSVLLMGCVAETGTQCVNLTTRTQLPPAYTNSFTRGVYYPDKVFRSSVLHSTQDLFLPFFSNVTWFHAIHVSGTNGTKRFDNPVLPFNDGVYFASTEKSNIIRGWIFGTTLDSKTQSLLIVNNATNVVIKVCEFQFCNDPFLGVYYHKNNKSWMESEFRVYSSANNCTFEYVSQPFLMDLEGKQGNFKNLREFVFKNIDGYFKIYSKHTPINLVRDLPQGFSALEPLVDLPIGINITRFQTLLALHRSYLTPGDSSSGWTAGAAAYYVGYLQPRTFLLKYNENGTITDAVDCALDPLSETKCTLKSFTVEKGIYQTSNFRVQPTESIVRFPNITNLCPFGEVFNATRFASVYAWNRKRISNCVADYSVLYNSASFSTFKCYGVSPTKLNDLCFTNVYADSFVIRGDEVRQIAPGQTGKIADYNYKLPDDFTGCVIAWNSNNLDSKVGGNYNYLYRLFRKSNLKPFERDISTEIYQAGSTPCNGVEGFNCYFPLQSYGFQPTNGVGYQPYRVVVLSFELLHAPATVCGPKKSTNLVKNKCVNFNFNGLTGTGVLTESNKKFLPFQQFGRDIADTTDAVRDPQTLEILDITPCSFGGVSVITPGTNTSNQVAVLYQDVNCTEVPVAIHADQLTPTWRVYSTGSNVFQTRAGCLIGAEHVNNSYECDIPIGAGICASYQTQTNSPSGAGSVASQSIIAYTMSLGAENSVAYSNNSIAIPTNFTISVTTEILPVSMTKTSVDCTMYICGDSTECSNLLLQYGSFCTQLNRALTGIAVEQDKNTQEVFAQVKQIYKTPPIKDFGGFNFSQILPDPSKPSKRSFIEDLLFNKVTLADAGFIKQYGDCLGDIAARDLICAQKFNGLTVLPPLLTDEMIAQYTSALLAGTITSGWTFGAGAALQIPFAMQMAYRFNGIGVTQNVLYENQKLIANQFNSAIGKIQDSLSSTASALGKLQDVVNQNAQALNTLVKQLSSNFGAISSVLNDILSRLDPPEAEVQIDRLITGRLQSLQTYVTQQLIRAAEIRASANLAATKMSECVLGQSKRVDFCGKGYHLMSFPQSAPHGVVFLHVTYVPAQEKNFTTAPAICHDGKAHFPREGVFVSNGTHWFVTQRNFYEPQIITTDNTFVSGNCDVVIGIVNNTVYDPLQPRLDSFKEELDKYFKNHTSPDVDLGDISGINASVVNIQKEIDRLNEVAKNLNESLIDLQELGKYEQYIKGSGRENLYFQGGGGSGYIPEAPRDGQAYVRKDGEWVLLSTFLGHHHHHHHH

SEQ ID NO: 5562 - protein, 1281 aa, Artificial Sequence
  Description of Artificial Sequence: Synthetic polypeptide
MGILPSPGMPALLSLVSLLSVLLMGCVAETGTQCVNLTTRTQLPPAYTNSFTRGVYYPDKVFRSSVLHSTQDLFLPFFSNVTWFHAIHVSGTNGTKRFDNPVLPFNDGVYFASTEKSNIIRGWIFGTTLDSKTQSLLIVNNATNVVIKVCEFQFCNDPFLGVYYHKNNKSWMESEFRVYSSANNCTFEYVSQPFLMDLEGKQGNFKNLREFVFKNIDGYFKIYSKHTPINLVRDLPQGFSALEPLVDLPIGINITRFQTLLALHRSYLTPGDSSSGWTAGAAAYYVGYLQPRTFLLKYNENGTITDAVDCALDPLSETKCTLKSFTVEKGIYQTSNFRVQPTESIVRFPNITNLCPFGEVFNATRFASVYAWNRKRISNCVADYSVLYNSASFSTFKCYGVSPTKLNDLCFTNVYADSFVIRGDEVRQVAPGQTGKIADYNYKLPDDFTGCVIAWNSNNLDSKVGGNYNYLYRLFRKSNLKPFERDISTEIYQAGSTPCNGVEGFNCYFPLQSYGFQPTNGVGYQPYRVVVLSFELLHAPATVCGPKKSTNLVKNKCVNFNFNGLTGTGVLTESNKKFLPFQQFGRDIADTTDAVRDPQTLEILDITPCSFGGVSVITPGTNTSNQVAVLYQDVNCTEVPVAIHADQLTPTWRVYSTGSNVFQTRAGCLIGAEHVNNSYECDIPIGAGICASYQTQTNSPSGAGSVASQSIIAYTMSLGAENSVAYSNNSIAIPTNFTISVTTEILPVSMTKTSVDCTMYICGDSTECSNLLLQYGSFCTQLNRALTGIAVEQDKNTQEVFAQVKQIYKTPPIKDFGGFNFSQILPDPSKPSKRSFIEDLLFNKVTLADAGFIKQYGDCLGDIAARDLICAQKFNGLTVLPPLLTDEMIAQYTSALLAGTITSGWTFGAGAALQIPFAMQMAYRFNGIGVTQNVLYENQKLIANQFNSAIGKIQDSLSSTASALGKLQDVVNQNAQALNTLVKQLSSNFGAISSVLNDILSRLDPPEAEVQIDRLITGRLQSLQTYVTQQLIRAAEIRASANLAATKMSECVLGQSKRVDFCGKGYHLMSFPQSAPHGVVFLHVTYVPAQEKNFTTAPAICHDGKAHFPREGVFVSNGTHWFVTQRNFYEPQIITTDNTFVSGNCDVVIGIVNNTVYDPLQPELDSFKEELDKYFKNHTSPDVDLGDISGINASVVNIQKEIDRLNEVAKNLNESLIDLQELGKYEQYIKGSGRENLYFQGGGGSGYIPEAPRDGQAYVRKDGEWVLLSTFLGHHHHHHHH

SEQ ID NO: 5563 - protein, 1281 aa, Artificial Sequence
  Description of Artificial Sequence: Synthetic polypeptide
MGILPSPGMPALLSLVSLLSVLLMGCVAETGTQCVNLTTRTQLPPAYTNSFTRGVYYPDKVFRSSVLHSTQDLFLPFFSNVTWFHAIHVSGTNGTKRFDNPVLPFNDGVYFASTEKSNIIRGWIFGTTLDSKTQSLLIVNNATNVVIKVCEFQFCNDPFLGVYYHKNNKSWMESEFRVYSSANNCTFEYVSQPFLMDLEGKQGNFKNLREFVFKNIDGYFKIYSKHTPINLVRDLPQGFSALEPLVDLPIGINITRFQTLLALHRSYLTPGDSSSGWTAGAAAYYVGYLQPRTFLLKYNENGTITDAVDCALDPLSETKCTLKSFTVEKGIYQTSNFRVQPTESIVRFPNITNLCPFGEVFNATRFASVYAWNRKRISNCVADYSVLYNSASFSTFKCYGVSPTKLNDLCFTNVYADSFVIRGDEVRQIAPGQTGKIADYNYKLPDDFTGCVIAWNSNNLDSKVGGNYNYLYRLFRKSNLKPFERDISTEIYQAGSTPCNGVEGFNCYFPLQSYGFQPTNGVGYQPYRVVVLSFELLHAPATVCGPKKSTNLVKNKCVNFNFNGLTGTGVLTESNKKFLPFQQFGRDIADTTDAVRDPQTLEILDITPCSFGGVSVITPGTNTSNQVAVLYQDVNCTEVPVAIHADQLTPTWRVYSTGSNVFQTRAGCLIGAEHVNNSYECDIPIGAGICASYQTQTNSPSGAGSVASQSIIAYTMSLGAENSVAYSNNSIAIPTNFTISVTTEILPVSMTKTSVDCTMYICGDSTECSNLLLQYGSFCTQLNRALTGIAVEQDKNTQEVFAQVKQIYKTPPIKDFGGFNFSQILPDPSKPSKRSFIEDLLFNKVTLADAGFIKQYGDCLGDIAARDLICAQKFNGLTVLPPLLTDEMIAQYTSALLAGTITSGWTFGAGAALQIPFAMQMAYRFNGIGVTQNVLYENQKLIANQFNSAIGKIQDSLSSTASALGKLQDVVNQNAQALNTLVKQLSSNFGAISSVLNDILSRLDPPEAEVQIDRLITGRLQSLQTYVTQQLIRAAEIRASANLAATKMSECVLGQSKRVDFCGEGYHLMSFPQSAPHGVVFLHVTYVPAQEKNFTTAPAICHDGKAHFPREGVFVSNGTHWFVTQRNFYEPQIITTDNTFVSGNCDVVIGIVNNTVYDPLQPELDSFKEELDKYFKNHTSPDVDLGDISGINASVVNIQKEIDRLNEVAKNLNESLIDLQELGKYEQYIKGSGRENLYFQGGGGSGYIPEAPRDGQAYVRKDGEWVLLSTFLGHHHHHHHH

SEQ ID NO: 5564 - protein, 1281 aa, Artificial Sequence
  Description of Artificial Sequence: Synthetic polypeptide
MGILPSPGMPALLSLVSLLSVLLMGCVAETGTQCVNLTTRTQLPPAYTNSFTRGVYYPDKVFRSSVLHSTQDLFLPFFSNVTWFHAIHVSGTNGTKRFDNPVLPFNDGVYFASTEKSNIIRGWIFGTTLDSKTQSLLIVNNATNVVIKVCEFQFCNDPFLGVYYHKNNKSWMESEFRVYSSANNCTFEYVSQPFLMDLEGKQGNFKNLREFVFKNIDGYFKIYSKHTPINLVRDLPQGFSALEPLVDLPIGINITRFQTLLALHRSYLTPGDSSSGWTAGAAAYYVGYLQPRTFLLKYNENGTITDAVDCALDPLSETKCTLKSFTVEKGIYQTSNFRVQPTESIVRFPNITNLCPFGEVFNATRFASVYAWNRKRISNCVADYSVLYNSASFSTFKCYGVSPTKLNDLCFTNVYADSFVIRGDEVRQIAPGQTGKIADYNYKLPDDFTGCVIAWNSNNLDSKVGGNYNYLYRLFRKSNLKPFERDISTEIYQAGSTPCNGVEGFNCYFPLQSYGFQPTNGVGYQPYRVVVLTFELLHAPATVCGPKKSTNLVKNKCVNFNFNGLTGTGVLTESNKKFLPFQQFGRDIADTTDAVRDPQTLEILDITPCSFGGVSVITPGTNTSNQVAVLYQDVNCTEVPVAIHADQLTPTWRVYSTGSNVFQTRAGCLIGAEHVNNSYECDIPIGAGICASYQTQTNSPSGAGSVASQSIIAYTMSLGAENSVAYSNNSIAIPTNFTISVTTEILPVSMTKTSVDCTMYICGDSTECSNLLLQYGSFCTQLNRALTGIAVEQDKNTQEVFAQVKQIYKTPPIKDFGGFNFSQILPDPSKPSKRSFIEDLLFNKVTLADAGFIKQYGDCLGDIAARDLICAQKFNGLTVLPPLLTDEMIAQYTSALLAGTITSGWTFGAGAALQIPFAMQMAYRFNGIGVTQNVLYENQKLIANQFNSAIGKIQDSLSSTASALGKLQDVVNQNAQALNTLVKQLSSNFGAISSVLNDILSRLDPPEAEVQIDRLITGRLQSLQTYVTQQLIRAAEIRASANLAATKMSECVLGQSKRVDFCGKGYHLMSFPQSAPHGVVFLHVTYVPAQEKNFTTAPAICHDGKAHFPREGVFVSNGTHWFVTQRNFYEPQIITTDNTFVSGNCDVVIGIVNNTVYDPLQPELDSFKEELDKYFKNHTSPDVDLGDISGINASVVNIQKEIDRLNEVAKNLNESLIDLQELGKYEQYIKGSGRENLYFQGGGGSGYIPEAPRDGQAYVRKDGEWVLLSTFLGHHHHHHHH

SEQ ID NO: 5565 - protein, 1281 aa, Artificial Sequence
  Description of Artificial Sequence: Synthetic polypeptide
MGILPSPGMPALLSLVSLLSVLLMGCVAETGTQCVNLTTRTQLPPAYTNSFTRGVYYPDKVFRSSVLHSTQDLFLPFFSNVTWFHAIHVSGTNGTKRFDNPVLPFNDGVYFASTEKSNIIRGWIFGTTLDSKTQSLLIVNNATNVVIKVCEFQFCNDPFLGVYYHKNNKSWMESEFRVYSSANNCTFEYVSQPFLMDLEGKQGNFKNLREFVFKNIDGYFKIYSKHTPINLVRDLPQGFSALEPLVDLPIGINITRFQTLLALHRSYLTPGDSSSGWTAGAAAYYVGYLQPRTFLLKYNENGTITDAVDCALDPLSETKCTLKSFTVEKGIYQTSNFRVQPTESIVRFPNITNLCPFGEVFNATRFASVYAWNRKRISNCVADYSVLYNSASFSTFKCYGVSPTKLNDLCFTNVYADSFVIRGDEVRQIAPGQTGKIADYNYKLPDDFTGCVIAWNSNNLDAKVGGNYNYLYRLFRKSNLKPFERDISTEIYQAGSTPCNGVEGFNCYFPLQSYGFQPTNGVGYQPYRVVVLSFELLHAPATVCGPKKSTNLVKNKCVNFNFNGLTGTGVLTESNKKFLPFQQFGRDIADTTDAVRDPQTLEILDITPCSFGGVSVITPGTNTSNQVAVLYQDVNCTEVPVAIHADQLTPTWRVYSTGSNVFQTRAGCLIGAEHVNNSYECDIPIGAGICASYQTQTNSPSGAGSVASQSIIAYTMSLGAENSVAYSNNSIAIPTNFTISVTTEILPVSMTKTSVDCTMYICGDSTECSNLLLQYGSFCTQLNRALTGIAVEQDKNTQEVFAQVKQIYKTPPIKDFGGFNFSQILPDPSKPSKRSFIEDLLFNKVTLADAGFIKQYGDCLGDIAARDLICAQKFNGLTVLPPLLTDEMIAQYTSALLAGTITSGWTFGAGAALQIPFAMQMAYRFNGIGVTQNVLYENQKLIANQFNSAIGKIQDSLSSTASALGKLQDVVNQNAQALNTLVKQLSSNFGAISSVLNDILSRLDPPEAEVQIDRLITGRLQSLQTYVTQQLIRAAEIRASANLAATKMSECVLGQSKRVDFCGKGYHLMSFPQSAPHGVVFLHVTYVPAQEKNFTTAPAICHDGKAHFPREGVFVSNGTHWFVTQRNFYEPQIITTDNTFVSGNCDVVIGIVNNTVYDPLQPELDSFKEELDKYFKNHTSPDVDLGDISGINASVVNIQKEIDRLNEVAKNLNESLIDLQELGKYEQYIKGSGRENLYFQGGGGSGYIPEAPRDGQAYVRKDGEWVLLSTFLGHHHHHHHH

SEQ ID NO: 5566 - protein, 1281 aa, Artificial Sequence
  Description of Artificial Sequence: Synthetic polypeptide
MGILPSPGMPALLSLVSLLSVLLMGCVAETGTQCVNLTTRTQLPPAYTNSFTRGVYYPDKVFRSSVLHSTQDLFLPFFSNVTWFHAIHVSGTNGTKRFDNPVLPFNDGVYFASTEKSNIIRGWIFGTTLDSKTQSLLIVNNATNVVIKVCEFQFCNDPFLGVYYHKNNKSWMESEFRVYSSANNCTFEYVSQPFLMDLEGKQGNFKNLREFVFKNIDGYFKIYSKHTPINLVRDLPQGFSALEPLVDLPIGINITRFQTLLALHRSYLTPGDSSSGWTAGAAAYYVGYLQPRTFLLKYNENGTITDAVDCALDPLSETKCTLKSFTVEKGIYQTSNFRVQPTESIVRFPNITNLCPFGEVFNATRFASVYAWNRKRISNCVADYSVLYNSASFSTFKCYGVSPTKLNDLCFTNVYADSFVIRGDEVRQIAPGQTGKIADYNYKLPDDFTGCVIAWNSNNLDSKVGGNYNYLYRLFRKSNLKPFERDISTEIYQAGSTPCNGVEGFNCYFPLQSYGFQPTNGVGYQPYRVVVLSFELLQAPATVCGPKKSTNLVKNKCVNFNFNGLTGTGVLTESNKKFLPFQQFGRDIADTTDAVRDPQTLEILDITPCSFGGVSVITPGTNTSNQVAVLYQDVNCTEVPVAIHADQLTPTWRVYSTGSNVFQTRAGCLIGAEHVNNSYECDIPIGAGICASYQTQTNSPSGAGSVASQSIIAYTMSLGAENSVAYSNNSIAIPTNFTISVTTEILPVSMTKTSVDCTMYICGDSTECSNLLLQYGSFCTQLNRALTGIAVEQDKNTQEVFAQVKQIYKTPPIKDFGGFNFSQILPDPSKPSKRSFIEDLLFNKVTLADAGFIKQYGDCLGDIAARDLICAQKFNGLTVLPPLLTDEMIAQYTSALLAGTITSGWTFGAGAALQIPFAMQMAYRFNGIGVTQNVLYENQKLIANQFNSAIGKIQDSLSSTASALGKLQDVVNQNAQALNTLVKQLSSNFGAISSVLNDILSRLDPPEAEVQIDRLITGRLQSLQTYVTQQLIRAAEIRASANLAATKMSECVLGQSKRVDFCGKGYHLMSFPQSAPHGVVFLHVTYVPAQEKNFTTAPAICHDGKAHFPREGVFVSNGTHWFVTQRNFYEPQIITTDNTFVSGNCDVVIGIVNNTVYDPLQPELDSFKEELDKYFKNHTSPDVDLGDISGINASVVNIQKEIDRLNEVAKNLNESLIDLQELGKYEQYIKGSGRENLYFQGGGGSGYIPEAPRDGQAYVRKDGEWVLLSTFLGHHHHHHHH

SEQ ID NO: 5567 - protein, 1281 aa, Artificial Sequence
  Description of Artificial Sequence: Synthetic polypeptide
MGILPSPGMPALLSLVSLLSVLLMGCVAETGTQCVNLTTRTQLPPAYTNSFTRGVYYPDKVFRSSVLHSTQDLFLPFFSNVTWFHAIHVSGTNGTKRFDNPVLPFNDGVYFASTEKSNIIRGWIFGTTLDSKTQSLLIVNNATNVVIKVCEFQFCNDPFLGVYYHKNNKSWMESEFRVYSSANNCTFEYVSQPFLMDLEGKQGNFKNLREFVFKNIDGYFKIYSKHTPINLVRDLPQGFSALEPLVDLPIGINITRFQTLLALHRSYLTPGDSSSGWTAGAAAYYVGYLQPRTFLLKYNENGTITDAVDCALDPLSETKCTLKSFTVEKGIYQTSNFRVQPTESIVRFPNITNLCPFGEVFNATRFASVYAWNRKRISNCVADYSVLYNSASFSTFKCYGVSPTKLNDLCFTNVYADSFVIRGDEVRQIAPGQTGKIADYNYKLPDDFTGCVIAWNSNNLDSKVGGNYNYLYRLFRKSNLKPFEQDISTEIYQAGSTPCNGVEGFNCYFPLQSYGFQPTNGVGYQPYRVVVLSFELLHAPATVCGPKKSTNLVKNKCVNFNFNGLTGTGVLTESNKKFLPFQQFGRDIADTTDAVRDPQTLEILDITPCSFGGVSVITPGTNTSNQVAVLYQDVNCTEVPVAIHADQLTPTWRVYSTGSNVFQTRAGCLIGAEHVNNSYECDIPIGAGICASYQTQTNSPSGAGSVASQSIIAYTMSLGAENSVAYSNNSIAIPTNFTISVTTEILPVSMTKTSVDCTMYICGDSTECSNLLLQYGSFCTQLNRALTGIAVEQDKNTQEVFAQVKQIYKTPPIKDFGGFNFSQILPDPSKPSKRSFIEDLLFNKVTLADAGFIKQYGDCLGDIAARDLICAQKFNGLTVLPPLLTDEMIAQYTSALLAGTITSGWTFGAGAALQIPFAMQMAYRFNGIGVTQNVLYENQKLIANQFNSAIGKIQDSLSSTASALGKLQDVVNQNAQALNTLVKQLSSNFGAISSVLNDILSRLDPPEAEVQIDRLITGRLQSLQTYVTQQLIRAAEIRASANLAATKMSECVLGQSKRVDFCGKGYHLMSFPQSAPHGVVFLHVTYVPAQEKNFTTAPAICHDGKAHFPREGVFVSNGTHWFVTQRNFYEPQIITTDNTFVSGNCDVVIGIVNNTVYDPLQPELDSFKEELDKYFKNHTSPDVDLGDISGINASVVNIQKEIDRLNEVAKNLNESLIDLQELGKYEQYIKGSGRENLYFQGGGGSGYIPEAPRDGQAYVRKDGEWVLLSTFLGHHHHHHHH

SEQ ID NO: 5568 - protein, 1281 aa, Artificial Sequence
  Description of Artificial Sequence: Synthetic polypeptide
MGILPSPGMPALLSLVSLLSVLLMGCVAETGTQCVNLTTRTQLPPAYTNSFTRGVYYPDKVFRSSVLHSTQDLFLPFFSNVTWFHAIHVSGTNGTKRFDNPVLPFNDGVYFASTEKSNIIRGWIFGTTLDSKTQSLLIVNNATNVVIKVCEFQFCNDPFLGVYYHKNNKSWMESEFRVYSSANNCTFEYVSQPFLMDLEGKQGNFKNLREFVFKNIDGYFKIYSKHTPINLVRDLPQGFSALEPLVDLPIGINITRFQTLLALHRSYLTPGDSSSGWTAGAAAYYVGYLQPRTFLLKYNENGTITDAVDCALDPLSETKCTLKSFTVEKGIYQTSNFRVQPTESIVRFPNITNLCPFGEVFNATRFASVYAWNRKRISNCVADYSVLYNSASFSTFKCYGVSPTKLNDLCFTNVYADSFVIRGDEVRQIAPGQTGKIADYNYKLPDDFTGCVIAWNSNNLDSKVGGNYNYLYRLFRKSNLKPFERDISTEIYQAGSTPGNGVEGFNCYFPLQSYGFQPTNGVGYQPYRVVVLSFELLHAPATVCGPKKSTNLVKNKCVNFNFNGLTGTGVLTESNKKFLPFQQFGRDIADTTDAVRDPQTLEILDITPCSFGGVSVITPGTNTSNQVAVLYQDVNCTEVPVAIHADQLTPTWRVYSTGSNVFQTRAGCLIGAEHVNNSYECDIPIGAGICASYQTQTNSPSGAGSVASQSIIAYTMSLGAENSVAYSNNSIAIPTNFTISVTTEILPVSMTKTSVDCTMYICGDSTECSNLLLQYGSFCTQLNRALTGIAVEQDKNTQEVFAQVKQIYKTPPIKDFGGFNFSQILPDPSKPSKRSFIEDLLFNKVTLADAGFIKQYGDCLGDIAARDLICAQKFNGLTVLPPLLTDEMIAQYTSALLAGTITSGWTFGAGAALQIPFAMQMAYRFNGIGVTQNVLYENQKLIANQFNSAIGKIQDSLSSTASALGKLQDVVNQNAQALNTLVKQLSSNFGAISSVLNDILSRLDPPEAEVQIDRLITGRLQSLQTYVTQQLIRAAEIRASANLAATKMSECVLGQSKRVDFCGKGYHLMSFPQSAPHGVVFLHVTYVPAQEKNFTTAPAICHDGKAHFPREGVFVSNGTHWFVTQRNFYEPQIITTDNTFVSGNCDVVIGIVNNTVYDPLQPELDSFKEELDKYFKNHTSPDVDLGDISGINASVVNIQKEIDRLNEVAKNLNESLIDLQELGKYEQYIKGSGRENLYFQGGGGSGYIPEAPRDGQAYVRKDGEWVLLSTFLGHHHHHHHH

SEQ ID NO: 5569 - protein, 1281 aa, Artificial Sequence
  Description of Artificial Sequence: Synthetic polypeptide
MGILPSPGMPALLSLVSLLSVLLMGCVAETGTQCVNLTTRTQLPPAYTNSFTRGVYYPDKVFRSSVLHSTQDLFLPFFSNVTWFHAIHVSGTNGTKRFDNPVLPFNDGVYFASTEKSNIIRGWIFGTTLDSKTQSLLIVNNATNVVIKVCEFQFCNDPFLGVYYHKNNKSWMESEFRVYSSANNCTFEYVSQPFLMDLEGKQGNFKNLREFVFKNIDGYFKIYSKHTPINLVRDLPQGFSALEPLVDLPIGINITRFQTLLALHRSYLTPGDSSSGWTAGAAAYYVGYLQPRTFLLKYNENGTITDAVDCALDPLSETKCTLKSFTVEKGIYQTSNFRVQPTESIVRFPNITNLCPFGEVFNATRFASVYAWNRKRISNCVADYSVLYNSASFSTFKCYGVSPTKLNDLCFTNVYADSFVIRGDEVRQIAPGQTGKIADYNYKLPDDFTGCVIAWNSNNLDSKVGGNYNYLYRLFRKSNLKPFERDISPEIYQAGSTPCNGVEGFNCYFPLQSYGFQPTNGVGYQPYRVVVLSFELLHAPATVCGPKKSTNLVKNKCVNFNFNGLTGTGVLTESNKKFLPFQQFGRDIADTTDAVRDPQTLEILDITPCSFGGVSVITPGTNTSNQVAVLYQDVNCTEVPVAIHADQLTPTWRVYSTGSNVFQTRAGCLIGAEHVNNSYECDIPIGAGICASYQTQTNSPSGAGSVASQSIIAYTMSLGAENSVAYSNNSIAIPTNFTISVTTEILPVSMTKTSVDCTMYICGDSTECSNLLLQYGSFCTQLNRALTGIAVEQDKNTQEVFAQVKQIYKTPPIKDFGGFNFSQILPDPSKPSKRSFIEDLLFNKVTLADAGFIKQYGDCLGDIAARDLICAQKFNGLTVLPPLLTDEMIAQYTSALLAGTITSGWTFGAGAALQIPFAMQMAYRFNGIGVTQNVLYENQKLIANQFNSAIGKIQDSLSSTASALGKLQDVVNQNAQALNTLVKQLSSNFGAISSVLNDILSRLDPPEAEVQIDRLITGRLQSLQTYVTQQLIRAAEIRASANLAATKMSECVLGQSKRVDFCGKGYHLMSFPQSAPHGVVFLHVTYVPAQEKNFTTAPAICHDGKAHFPREGVFVSNGTHWFVTQRNFYEPQIITTDNTFVSGNCDVVIGIVNNTVYDPLQPELDSFKEELDKYFKNHTSPDVDLGDISGINASVVNIQKEIDRLNEVAKNLNESLIDLQELGKYEQYIKGSGRENLYFQGGGGSGYIPEAPRDGQAYVRKDGEWVLLSTFLGHHHHHHHH

SEQ ID NO: 5570 - protein, 1281 aa, Artificial Sequence
  Description of Artificial Sequence: Synthetic polypeptide
MGILPSPGMPALLSLVSLLSVLLMGCVAETGTQCVNLTTRTQLPPAYTNSFTRGVYYPDKVFRSSVLHSTQDLFLPFFSNVTWFHAIHVSGTNGTKRFDNPVLPFNDGVYFASTEKSNIIRGWIFGTTLDSKTQSLLIVNNATNVVIKVCEFQFCNDPFLGVYYHKNNKSWMESEFRVYSSANNCTFEYVSQPFLMDLEGKQGNFKNLREFVFKNIDGYFKIYSKHTPINLVRDLPQGFSALEPLVDLPIGINITRFQTLLALHRSYLTPGDSSSGWTAGAAAYYVGYLQPRTFLLKYNENGTITDAVDCALDPLSETKCTLKSFTVEKGIYQTSNFRVQPTESIVRFPNITNLCPFGEVFNATRFASVYAWNRKRISNCVADYSVLYNSASFSTFKCYGVSPTKLNDLCFTNVYADSFVIRGDEVRQIAPGQTGKIADYNYKLPDDFTGCVIAWNSNNLDSKVGGNYNYLYRLFRKSNLKPFEDDISTEIYQAGSTPCNGVEGFNCYFPLQSYGFQPTNGVGYQPYRVVVLSFELLHAPATVCGPKKSTNLVKNKCVNFNFNGLTGTGVLTESNKKFLPFQQFGRDIADTTDAVRDPQTLEILDITPCSFGGVSVITPGTNTSNQVAVLYQDVNCTEVPVAIHADQLTPTWRVYSTGSNVFQTRAGCLIGAEHVNNSYECDIPIGAGICASYQTQTNSPSGAGSVASQSIIAYTMSLGAENSVAYSNNSIAIPTNFTISVTTEILPVSMTKTSVDCTMYICGDSTECSNLLLQYGSFCTQLNRALTGIAVEQDKNTQEVFAQVKQIYKTPPIKDFGGFNFSQILPDPSKPSKRSFIEDLLFNKVTLADAGFIKQYGDCLGDIAARDLICAQKFNGLTVLPPLLTDEMIAQYTSALLAGTITSGWTFGAGAALQIPFAMQMAYRFNGIGVTQNVLYENQKLIANQFNSAIGKIQDSLSSTASALGKLQDVVNQNAQALNTLVKQLSSNFGAISSVLNDILSRLDPPEAEVQIDRLITGRLQSLQTYVTQQLIRAAEIRASANLAATKMSECVLGQSKRVDFCGKGYHLMSFPQSAPHGVVFLHVTYVPAQEKNFTTAPAICHDGKAHFPREGVFVSNGTHWFVTQRNFYEPQIITTDNTFVSGNCDVVIGIVNNTVYDPLQPELDSFKEELDKYFKNHTSPDVDLGDISGINASVVNIQKEIDRLNEVAKNLNESLIDLQELGKYEQYIKGSGRENLYFQGGGGSGYIPEAPRDGQAYVRKDGEWVLLSTFLGHHHHHHHH

SEQ ID NO: 5571 - protein, 1281 aa, Artificial Sequence
  Description of Artificial Sequence: Synthetic polypeptide
MGILPSPGMPALLSLVSLLSVLLMGCVAETGTQCVNLTTRTQLPPAYTNSFTRGVYYPDKVFRSSVLHSTQDLFLPFFSNVTWFHAIHVSGTNGTKRFDNPVLPFNDGVYFASTEKSNIIRGWIFGTTLDSKTQSLLIVNNATNVVIKVCEFQFCNDPFLGVYYHKNNKSWMESEFRVYSSANNCTFEYVSQPFLMDLEGKQGNFKNLREFVFKNIDGYFKIYSKHTPINLVRDLPQGFSALEPLVDLPIGINITRFQTLLALHRSYLTPGDSSSGWTAGAAAYYVGYLQPRTFLLKYNENGTITDAVDCALDPLSETKCTLKSFTVEKGIYQTSNFRVQPTESIVRFPNITNLCPFGEVFNATRFASVYAWNRKRISNCVADYSVLYNSASFSTFKCYGVSPTKLNDLCFTNVYADSFVIRGDEVRQIAPGQTGKIADYNYKLPDDFTGCVIAWNSNNLDSKVGGNYNYLYRLFRKSNLKPFERDISTEIYQAGSTPCNGVEGFNCYFPLQSYGFQPTNGVGYQPYRVVVLSFELLHAPATVCGPKKSTNLVKNKCVNFNFNGLTGTGVLTESNKKFLPFQQFGRDIADTTDAVRDPQTLEILDITPCSFGGVSVITPGTNTSNQVAVLYQDVNCTEVPVAIHADQLTPTWRVYSTGSNVFQTRAGCLIGAEHVNNSYECDIPIGAGICASYQTQTNSPSGAGSVASQSIIAYTMSLGAENSVAYSNNSIAIPTNFTISVTTEILPVSMTKTSVDCTMYICGDSTECSNLLLQYGSFCTQLNRALTGIAVEQDKNTQEVFAQVKQIYKTPPIKDFGGFNFSQILPDPSKPSKRSFIEDLLFNKVTLADAGFIKQYGDCLGDIAARDLICAQKFNGLTVLPPLLTDEMIAQYTSALLAGTITSGWTFGAGAALQIPFAMQMAYRFNGIGVTQNVLYENQKLIANQFNSAIGKIQDSLSSTASALGKLQDVVNQNAQALNTLVKQLSSNFGAISSVLNDILSRLSPPEAEVQIDRLITGRLQSLQTYVTQQLIRAAEIRASANLAATKMSECVLGQSKRVDFCGKGYHLMSFPQSAPHGVVFLHVTYVPAQEKNFTTAPAICHDGKAHFPREGVFVSNGTHWFVTQRNFYEPQIITTDNTFVSGNCDVVIGIVNNTVYDPLQPELDSFKEELDKYFKNHTSPDVDLGDISGINASVVNIQKEIDRLNEVAKNLNESLIDLQELGKYEQYIKGSGRENLYFQGGGGSGYIPEAPRDGQAYVRKDGEWVLLSTFLGHHHHHHHH

SEQ ID NO: 5572 - protein, 1281 aa, Artificial Sequence
  Description of Artificial Sequence: Synthetic polypeptide
MGILPSPGMPALLSLVSLLSVLLMGCVAETGTQCVNLTTRTQLPPAYTNSFTRGVYYPDKVFRSSVLHSTQDLFLPFFSNVTWFHAIHVSGTNGTKRFDNPVLPFNDGVYFASTEKSNIIRGWIFGTTLDSKTQSLLIVNNATNVVIKVCEFQFCNDPFLGVYYHKNNKSWMESEFRVYSSANNCTFEYVSQPFLMDLEGKQGNFKNLREFVFKNIDGYFKIYSKHTPINLVRDLPQGFSALEPLVDLPIGINITRFQTLLALHRSYLTPGDSSSGWTAGAAAYYVGYLQPRTFLLKYNENGTITDAVDCALDPLSETKCTLKSFTVEKGIYQTSNFRVQPTESIVRFPNITNLCPFGEVFNATRFASVYAWNRKRISNCVADYSVLYNSASFSTFKCYGVSPTKLNDLCFTNVYADSFVIRGDEVRQIAPGQTGKIADYNYKLPDDFTGCVIAWNSNNLDSKVGGNYNYLYRLFRKSNLKPFERDISTEIYQAGSTPCNGVEGFNCYFPLQSYGFQPTNGVGYQPYRVVVLSFELLHAPATVCGPKKSTNLVKNKCVNFNFNGLTGTGVLTESNKKFLPFQQFGRDIADTTDAVRDPQTLEILDITPCSFGGVSVITPGTNTSNQVAVLYQDVNCTEVPVAIHADQLTPTWRVYSTGSNVFQTRAGCLIGAEHVNNSYECDIPIGAGICASYQTQTNSPSGAGSVASQSIIAYTMSLGAENSVAYSNNSIAIPTNFTISVTTEILPVSMTKTSVDCTMYICGDSTECSNLLLQYGSFCTQLNRALTGIAVEQDKNTQEVFAQVKQIYKTPPIKDFGGFNFSQILPDPSKPSKRSFIEDLLFNKVTLADAGFIKQYGDCLGDIAARDLICAQKFNGLTVLPPLLTDEMIAQYTSALLAGTITSGWTFGAGAALQIPFAMQMAYRFNGIGVTQNVLYENQKLIANQFNSAIGKIQDSLSSTASALGKLQDVVNQNAQALNTLIKQLSSNFGAISSVLNDILSRLDPPEAEVQIDRLITGRLQSLQTYVTQQLIRAAEIRASANLAATKMSECVLGQSKRVDFCGKGYHLMSFPQSAPHGVVFLHVTYVPAQEKNFTTAPAICHDGKAHFPREGVFVSNGTHWFVTQRNFYEPQIITTDNTFVSGNCDVVIGIVNNTVYDPLQPELDSFKEELDKYFKNHTSPDVDLGDISGINASVVNIQKEIDRLNEVAKNLNESLIDLQELGKYEQYIKGSGRENLYFQGGGGSGYIPEAPRDGQAYVRKDGEWVLLSTFLGHHHHHHHH

SEQ ID NO: 5573 - protein, 1281 aa, Artificial Sequence
  Description of Artificial Sequence: Synthetic polypeptide
MGILPSPGMPALLSLVSLLSVLLMGCVAETGTQCVNLTTRTQLPPAYTNSFTRGVYYPDKVFRSSVLHSTQDLFLPFFSNVTWFHAIHVSGTNGTKRFDNPVLPFNDGVYFASTEKSNIIRGWIFGTTLDSKTQSLLIVNNATNVVIKVCEFQFCNDPFLGVYYHKNNKSWMESEFRVYSSANNCTFEYVSQPFLMDLEGKQGNFKNLREFVFKNIDGYFKIYSKHTPINLVRDLPQGFSALEPLVDLPIGINITRFQTLLALHRSYLTPGDSSSGWTAGAAAYYVGYLQPRTFLLKYNENGTITDAVDCALDPLSETKCTLKSFTVEKGIYQTSNFRVQPTESIVRFPNITNLCPFGEVFNATRFASVYAWNRKRISNCVADYSVLYNSASFSTFKCYGVSPTKLNDLCFTNVYADSFVIRGDEVRQIAPGQTGKIADYNYKLPDDFTGCVIAWNSNNLDSKVGGNYNYLYRLFRKSNLKPFERDISTEIYQAGSTPCNGVEGFNCYFPLQSYGFQPTNGVGYQPYRVVVLSFELLHAPATVCGPKKSTNLVKNKCVNFNFNGLTGTGVLTESNKKFLPFQQFGRDIADTTDAVRDPQTLEILDITPCSFGGVSVITPGTNTSNQVAVLYQDVNCTEVPVAIHADQLTPTWRVYSTGSNVFQTRAGCLIGAEHVNNSYECDIPIGAGICASYQTQTNSPSGAGSVASQSIIAYTMSLGAENRVAYSNNSIAIPTNFTISVTTEILPVSMTKTSVDCTMYICGDSTECSNLLLQYGSFCTQLNRALTGIAVEQDKNTQEVFAQVKQIYKTPPIKDFGGFNFSQILPDPSKPSKRSFIEDLLFNKVTLADAGFIKQYGDCLGDIAARDLICAQKFNGLTVLPPLLTDEMIAQYTSALLAGTITSGWTFGAGAALQIPFAMQMAYRFNGIGVTQNVLYENQKLIANQFNSAIGKIQDSLSSTASALGKLQDVVNQNAQALNTLVKQLSSNFGAISSVLNDILSRLDPPEAEVQIDRLITGRLQSLQTYVTQQLIRAAEIRASANLAATKMSECVLGQSKRVDFCGKGYHLMSFPQSAPHGVVFLHVTYVPAQEKNFTTAPAICHDGKAHFPREGVFVSNGTHWFVTQRNFYEPQIITTDNTFVSGNCDVVIGIVNNTVYDPLQPELDSFKEELDKYFKNHTSPDVDLGDISGINASVVNIQKEIDRLNEVAKNLNESLIDLQELGKYEQYIKGSGRENLYFQGGGGSGYIPEAPRDGQAYVRKDGEWVLLSTFLGHHHHHHHH

SEQ ID NO: 5574 - protein, 1281 aa, Artificial Sequence
  Description of Artificial Sequence: Synthetic polypeptide
MGILPSPGMPALLSLVSLLSVLLMGCVAETGTQCVNLTTRTQLPPAYTNSFTRGVYYPDKVFRSSVLHSTQDLFLPFFSNVTWFHAIHVSGTNGTKRFDNPVLPFNDGVYFASTEKSNIIRGWIFGTTLDSKTQSLLIVNNATNVVIKVCEFQFCNDPFLGVYYHKNNKSWMESEFRVYSSANNCTFEYVSQPFLMDLEGKQGNFKNLREFVFKNIDGYFKIYSKHTPINLVRDLPQGFSALEPLVDLPIGINITRFQTLLALHRSYLTPGDSSSGWTAGAAAYYVGYLQPRTFLLKYNENGTITDAVDCALDPLSETKCTLKSFTVEKGIYQTSNFRVQPTESIVRFPNITNLCPFGEVFNATRFASVYAWNRKRISNCVADYSVLYNSASFSTFKCYGVSPTKLNDLCFTNVYADSFVIRGDEVRQIAPGQTGKIADYNYKLPDDFTGCVIAWNSNNLDSKVGGNYNYLYRLFRKSNLKPFERFISTEIYQAGSTPCNGVEGFNCYFPLQSYGFQPTNGVGYQPYRVVVLSFELLHAPATVCGPKKSTNLVKNKCVNFNFNGLTGTGVLTESNKKFLPFQQFGRDIADTTDAVRDPQTLEILDITPCSFGGVSVITPGTNTSNQVAVLYQDVNCTEVPVAIHADQLTPTWRVYSTGSNVFQTRAGCLIGAEHVNNSYECDIPIGAGICASYQTQTNSPSGAGSVASQSIIAYTMSLGAENSVAYSNNSIAIPTNFTISVTTEILPVSMTKTSVDCTMYICGDSTECSNLLLQYGSFCTQLNRALTGIAVEQDKNTQEVFAQVKQIYKTPPIKDFGGFNFSQILPDPSKPSKRSFIEDLLFNKVTLADAGFIKQYGDCLGDIAARDLICAQKFNGLTVLPPLLTDEMIAQYTSALLAGTITSGWTFGAGAALQIPFAMQMAYRFNGIGVTQNVLYENQKLIANQFNSAIGKIQDSLSSTASALGKLQDVVNQNAQALNTLVKQLSSNFGAISSVLNDILSRLDPPEAEVQIDRLITGRLQSLQTYVTQQLIRAAEIRASANLAATKMSECVLGQSKRVDFCGKGYHLMSFPQSAPHGVVFLHVTYVPAQEKNFTTAPAICHDGKAHFPREGVFVSNGTHWFVTQRNFYEPQIITTDNTFVSGNCDVVIGIVNNTVYDPLQPELDSFKEELDKYFKNHTSPDVDLGDISGINASVVNIQKEIDRLNEVAKNLNESLIDLQELGKYEQYIKGSGRENLYFQGGGGSGYIPEAPRDGQAYVRKDGEWVLLSTFLGHHHHHHHH

SEQ ID NO: 5575 - protein, 1281 aa, Artificial Sequence
  Description of Artificial Sequence: Synthetic polypeptide
MGILPSPGMPALLSLVSLLSVLLMGCVAETGTQCVNLTTRTQLPPAYTNSFTRGVYYPDKVFRSSVLHSTQDLFLPFFSNVTWFHAIHVSGTNGTKRFDNPVLPFNDGVYFASTEKSNIIRGWIFGTTLDSKTQSLLIVNNATNVVIKVCEFQFCNDPFLGVYYHKNNKSWMESEFRVYSSANNCTFEYVSQPFLMDLEGKQGNFKNLREFVFKNIDGYFKIYSKHTPINLVRDLPQGFSALEPLVDLPIGINITRFQTLLALHRSYLTPGDSSSGWTAGAAAYYVGYLQPRTFLLKYNENGTITDAVDCALDPLSETKCTLKSFTVEKGIYQTSNFRVQPTESIVRFPNITNLCPFGEVFNATRFASVYAWNRKRISNCVADYSVLYNSASFSTFKCYGVSPTKLNDLCFTNVYADSFVIRGDEVRQIAPGQTGKIADYNYKLPDDFTGCVIAWNSNNLDSKVGGNYNYLYRLFRKSNLKPFERDISTEIYQAGSTPCNGVEGFNCYFPLQSYGFQPTNGVGYQPYRVVVLLFELLHAPATVCGPKKSTNLVKNKCVNFNFNGLTGTGVLTESNKKFLPFQQFGRDIADTTDAVRDPQTLEILDITPCSFGGVSVITPGTNTSNQVAVLYQDVNCTEVPVAIHADQLTPTWRVYSTGSNVFQTRAGCLIGAEHVNNSYECDIPIGAGICASYQTQTNSPSGAGSVASQSIIAYTMSLGAENSVAYSNNSIAIPTNFTISVTTEILPVSMTKTSVDCTMYICGDSTECSNLLLQYGSFCTQLNRALTGIAVEQDKNTQEVFAQVKQIYKTPPIKDFGGFNFSQILPDPSKPSKRSFIEDLLFNKVTLADAGFIKQYGDCLGDIAARDLICAQKFNGLTVLPPLLTDEMIAQYTSALLAGTITSGWTFGAGAALQIPFAMQMAYRFNGIGVTQNVLYENQKLIANQFNSAIGKIQDSLSSTASALGKLQDVVNQNAQALNTLVKQLSSNFGAISSVLNDILSRLDPPEAEVQIDRLITGRLQSLQTYVTQQLIRAAEIRASANLAATKMSECVLGQSKRVDFCGKGYHLMSFPQSAPHGVVFLHVTYVPAQEKNFTTAPAICHDGKAHFPREGVFVSNGTHWFVTQRNFYEPQIITTDNTFVSGNCDVVIGIVNNTVYDPLQPELDSFKEELDKYFKNHTSPDVDLGDISGINASVVNIQKEIDRLNEVAKNLNESLIDLQELGKYEQYIKGSGRENLYFQGGGGSGYIPEAPRDGQAYVRKDGEWVLLSTFLGHHHHHHHH

SEQ ID NO: 5576 - protein, 1281 aa, Artificial Sequence
  Description of Artificial Sequence: Synthetic polypeptide
MGILPSPGMPALLSLVSLLSVLLMGCVAETGTQCVNLTTRTQLPPAYTNSFTRGVYYPDKVFRSSVLHSTQDLFLPFFSNVTWFHAIHVSGTNGTKRFDNPVLPFNDGVYFASTEKSNIIRGWIFGTTLDSKTQSLLIVNNATNVVIKVCEFQFCNDPFLGVYYHKNNKSWMESEFRVYSSANNCTFEYVSQPFLMDLEGKQGNFKNLREFVFKNIDGYFKIYSKHTPINLVRDLPQGFSALEPLVDLPIGINITRFQTLLALHRSYLTPGDSSSGWTAGAAAYYVGYLQPRTFLLKYNENGTITDAVDCALDPLSETKCTLKSFTVEKGIYQTSNFRVQPTESIVRFPNITNLCPFGEVFNATRFASVYAWNRKRISNCVADYSVLYNSASFDTFKCYGVSPTKLNDLCFTNVYADSFVIRGDEVRQIAPGQTGKIADYNYKLPDDFTGCVIAWNSNNLDSKVGGNYNYLYRLFRKSNLKPFERDISTEIYQAGSTPCNGVEGFNCYFPLQSYGFQPTNGVGYQPYRVVVLSFELLHAPATVCGPKKSTNLVKNKCVNFNFNGLTGTGVLTESNKKFLPFQQFGRDIADTTDAVRDPQTLEILDITPCSFGGVSVITPGTNTSNQVAVLYQDVNCTEVPVAIHADQLTPTWRVYSTGSNVFQTRAGCLIGAEHVNNSYECDIPIGAGICASYQTQTNSPSGAGSVASQSIIAYTMSLGAENSVAYSNNSIAIPTNFTISVTTEILPVSMTKTSVDCTMYICGDSTECSNLLLQYGSFCTQLNRALTGIAVEQDKNTQEVFAQVKQIYKTPPIKDFGGFNFSQILPDPSKPSKRSFIEDLLFNKVTLADAGFIKQYGDCLGDIAARDLICAQKFNGLTVLPPLLTDEMIAQYTSALLAGTITSGWTFGAGAALQIPFAMQMAYRFNGIGVTQNVLYENQKLIANQFNSAIGKIQDSLSSTASALGKLQDVVNQNAQALNTLVKQLSSNFGAISSVLNDILSRLDPPEAEVQIDRLITGRLQSLQTYVTQQLIRAAEIRASANLAATKMSECVLGQSKRVDFCGKGYHLMSFPQSAPHGVVFLHVTYVPAQEKNFTTAPAICHDGKAHFPREGVFVSNGTHWFVTQRNFYEPQIITTDNTFVSGNCDVVIGIVNNTVYDPLQPELDSFKEELDKYFKNHTSPDVDLGDISGINASVVNIQKEIDRLNEVAKNLNESLIDLQELGKYEQYIKGSGRENLYFQGGGGSGYIPEAPRDGQAYVRKDGEWVLLSTFLGHHHHHHHH

SEQ ID NO: 5577 - protein, 1281 aa, Artificial Sequence
  Description of Artificial Sequence: Synthetic polypeptide
MGILPSPGMPALLSLVSLLSVLLMGCVAETGTQCVNLTTRTQLPPAYTNSFTRGVYYPDKVFRSSVLHSTQDLFLPFFSNVTWFHAIHVSGTNGTKRFDNPVLPFNDGVYFASTEKSNIIRGWIFGTTLDSKTQSLLIVNNATNVVIKVCEFQFCNDPFLGVYYHKNNKSWMESEFRVYSSANNCTFEYVSQPFLMDLEGKQGNFKNLREFVFKNIDGYFKIYSKHTPINLVRDLPQGFSALEPLVDLPIGINITRFQTLLALHRSYLTPGDSSSGWTAGAAAYYVGYLQPRTFLLKYNENGTITDAVDCALDPLSETKCTLKSFTVEKGIYQTSNFRVQPTESIVRFPNITNLCPFGEVFNATRFASVYAWNRKRISNCVADYSVLYNSASFSTFKCYGVSPTKLNDLCFTNVYADSFVIRGDEVRQIAPGQTGKIADYNYKLPDDFTGCVIAWNSNNLDSKVGGNYNYLYRLFRKSNLKPFERDISTEIYQAGSTPCNGVEGFNCYFPLQSYGFQPTNGVGYQPYRVVVLIFELLHAPATVCGPKKSTNLVKNKCVNFNFNGLTGTGVLTESNKKFLPFQQFGRDIADTTDAVRDPQTLEILDITPCSFGGVSVITPGTNTSNQVAVLYQDVNCTEVPVAIHADQLTPTWRVYSTGSNVFQTRAGCLIGAEHVNNSYECDIPIGAGICASYQTQTNSPSGAGSVASQSIIAYTMSLGAENSVAYSNNSIAIPTNFTISVTTEILPVSMTKTSVDCTMYICGDSTECSNLLLQYGSFCTQLNRALTGIAVEQDKNTQEVFAQVKQIYKTPPIKDFGGFNFSQILPDPSKPSKRSFIEDLLFNKVTLADAGFIKQYGDCLGDIAARDLICAQKFNGLTVLPPLLTDEMIAQYTSALLAGTITSGWTFGAGAALQIPFAMQMAYRFNGIGVTQNVLYENQKLIANQFNSAIGKIQDSLSSTASALGKLQDVVNQNAQALNTLVKQLSSNFGAISSVLNDILSRLDPPEAEVQIDRLITGRLQSLQTYVTQQLIRAAEIRASANLAATKMSECVLGQSKRVDFCGKGYHLMSFPQSAPHGVVFLHVTYVPAQEKNFTTAPAICHDGKAHFPREGVFVSNGTHWFVTQRNFYEPQIITTDNTFVSGNCDVVIGIVNNTVYDPLQPELDSFKEELDKYFKNHTSPDVDLGDISGINASVVNIQKEIDRLNEVAKNLNESLIDLQELGKYEQYIKGSGRENLYFQGGGGSGYIPEAPRDGQAYVRKDGEWVLLSTFLGHHHHHHHH

SEQ ID NO: 5578 - protein, 1281 aa, Artificial Sequence
  Description of Artificial Sequence: Synthetic polypeptide
MGILPSPGMPALLSLVSLLSVLLMGCVAETGTQCVNLTTRTQLPPAYTNSFTRGVYYPDKVFRSSVLHSTQDLFLPFFSNVTWFHAIHVSGTNGTKRFDNPVLPFNDGVYFASTEKSNIIRGWIFGTTLDSKTQSLLIVNNATNVVIKVCEFQFCNDPFLGVYYHKNNKSWMESEFRVYSSANNCTFEYVSQPFLMDLEGKQGNFKNLREFVFKNIDGYFKIYSKHTPINLVRDLPQGFSALEPLVDLPIGINITRFQTLLALHRSYLTPGDSSSGWTAGAAAYYVGYLQPRTFLLKYNENGTITDAVDCALDPLSETKCTLKSFTVEKGIYQTSNFRVQPTESIVRFPNITNLCPFGEVFNATRFASVYAWNRKRISNCVADYSVLYNSASFSTFKCYGVSPTKLNDLCFTNVYADSFVIRGDEVRQIAPGQTGKIADYNYKLPDDFTGCVIAWNSNNLDSKVGGNYNYLYRLFRKSNLKPFERDISTERYQAGSTPCNGVEGFNCYFPLQSYGFQPTNGVGYQPYRVVVLSFELLHAPATVCGPKKSTNLVKNKCVNFNFNGLTGTGVLTESNKKFLPFQQFGRDIADTTDAVRDPQTLEILDITPCSFGGVSVITPGTNTSNQVAVLYQDVNCTEVPVAIHADQLTPTWRVYSTGSNVFQTRAGCLIGAEHVNNSYECDIPIGAGICASYQTQTNSPSGAGSVASQSIIAYTMSLGAENSVAYSNNSIAIPTNFTISVTTEILPVSMTKTSVDCTMYICGDSTECSNLLLQYGSFCTQLNRALTGIAVEQDKNTQEVFAQVKQIYKTPPIKDFGGFNFSQILPDPSKPSKRSFIEDLLFNKVTLADAGFIKQYGDCLGDIAARDLICAQKFNGLTVLPPLLTDEMIAQYTSALLAGTITSGWTFGAGAALQIPFAMQMAYRFNGIGVTQNVLYENQKLIANQFNSAIGKIQDSLSSTASALGKLQDVVNQNAQALNTLVKQLSSNFGAISSVLNDILSRLDPPEAEVQIDRLITGRLQSLQTYVTQQLIRAAEIRASANLAATKMSECVLGQSKRVDFCGKGYHLMSFPQSAPHGVVFLHVTYVPAQEKNFTTAPAICHDGKAHFPREGVFVSNGTHWFVTQRNFYEPQIITTDNTFVSGNCDVVIGIVNNTVYDPLQPELDSFKEELDKYFKNHTSPDVDLGDISGINASVVNIQKEIDRLNEVAKNLNESLIDLQELGKYEQYIKGSGRENLYFQGGGGSGYIPEAPRDGQAYVRKDGEWVLLSTFLGHHHHHHHH

SEQ ID NO: 5579 - protein, 1281 aa, Artificial Sequence
  Description of Artificial Sequence: Synthetic polypeptide
MGILPSPGMPALLSLVSLLSVLLMGCVAETGTQCVNLTTRTQLPPAYTNSFTRGVYYPDKVFRSSVLHSTQDLFLPFFSNVTWFHAIHVSGTNGTKRFDNPVLPFNDGVYFASTEKSNIIRGWIFGTTLDSKTQSLLIVNNATNVVIKVCEFQFCNDPFLGVYYHKNNKSWMESEFRVYSSANNCTFEYVSQPFLMDLEGKQGNFKNLREFVFKNIDGYFKIYSKHTPINLVRDLPQGFSALEPLVDLPIGINITRFQTLLALHRSYLTPGDSSSGWTAGAAAYYVGYLQPRTFLLKYNENGTITDAVDCALDPLSETKCTLKSFTVEKGIYQTSNFRVQPTESIVRFPNITNLCPFGEVFNATRFASVYAWNRKRISNCVADYSVLYNSASFSTFKCYGVSPTKLNDLCFTNVYADSFVIRGDEVRQIAPGQTGKIADYNYKLPDDFTGCVIAWNSNNLDSKVGGNYNYLYRLFRKSNLKPFERDISTEIYQAGSTPCNGVEGFNCYFPLQSYGFQPTNGVGYQPYRVVVLSFELTHAPATVCGPKKSTNLVKNKCVNFNFNGLTGTGVLTESNKKFLPFQQFGRDIADTTDAVRDPQTLEILDITPCSFGGVSVITPGTNTSNQVAVLYQDVNCTEVPVAIHADQLTPTWRVYSTGSNVFQTRAGCLIGAEHVNNSYECDIPIGAGICASYQTQTNSPSGAGSVASQSIIAYTMSLGAENSVAYSNNSIAIPTNFTISVTTEILPVSMTKTSVDCTMYICGDSTECSNLLLQYGSFCTQLNRALTGIAVEQDKNTQEVFAQVKQIYKTPPIKDFGGFNFSQILPDPSKPSKRSFIEDLLFNKVTLADAGFIKQYGDCLGDIAARDLICAQKFNGLTVLPPLLTDEMIAQYTSALLAGTITSGWTFGAGAALQIPFAMQMAYRFNGIGVTQNVLYENQKLIANQFNSAIGKIQDSLSSTASALGKLQDVVNQNAQALNTLVKQLSSNFGAISSVLNDILSRLDPPEAEVQIDRLITGRLQSLQTYVTQQLIRAAEIRASANLAATKMSECVLGQSKRVDFCGKGYHLMSFPQSAPHGVVFLHVTYVPAQEKNFTTAPAICHDGKAHFPREGVFVSNGTHWFVTQRNFYEPQIITTDNTFVSGNCDVVIGIVNNTVYDPLQPELDSFKEELDKYFKNHTSPDVDLGDISGINASVVNIQKEIDRLNEVAKNLNESLIDLQELGKYEQYIKGSGRENLYFQGGGGSGYIPEAPRDGQAYVRKDGEWVLLSTFLGHHHHHHHH

SEQ ID NO: 5580 - protein, 1281 aa, Artificial Sequence
  Description of Artificial Sequence: Synthetic polypeptide
MGILPSPGMPALLSLVSLLSVLLMGCVAETGTQCVNLTTRTQLPPAYTNSFTRGVYYPDKVFRSSVLHSTQDLFLPFFSNVTWFHAIHVSGTNGTKRFDNPVLPFNDGVYFASTEKSNIIRGWIFGTTLDSKTQSLLIVNNATNVVIKVCEFQFCNDPFLGVYYHKNNKSWMESEFRVYSSANNCTFEYVSQPFLMDLEGKQGNFKNLREFVFKNIDGYFKIYSKHTPINLVRDLPQGFSALEPLVDLPIGINITRFQTLLALHRSYLTPGDSSSGWTAGAAAYYVGYLQPRTFLLKYNENGTITDAVDCALDPLSETKCTLKSFTVEKGIYQTSNFRVQPTESIVRFPNITNLCPFGEVFNATRFASVYAWNRKRISNCVADYSVLYNSASFSTFKCYGVSPTKLNDLCFTNVYADSFVIRGDEVRQIAPGQTGKIADYNYKLPDDFTGCVIAWNSNNLDSKVGGNYNYLYRLFRKSNLKPFERDISTEIYQAGSTPCNGVEGFNCYFPLQSYGFQPTNGVGYQPYRVVVLSFELLMAPATVCGPKKSTNLVKNKCVNFNFNGLTGTGVLTESNKKFLPFQQFGRDIADTTDAVRDPQTLEILDITPCSFGGVSVITPGTNTSNQVAVLYQDVNCTEVPVAIHADQLTPTWRVYSTGSNVFQTRAGCLIGAEHVNNSYECDIPIGAGICASYQTQTNSPSGAGSVASQSIIAYTMSLGAENSVAYSNNSIAIPTNFTISVTTEILPVSMTKTSVDCTMYICGDSTECSNLLLQYGSFCTQLNRALTGIAVEQDKNTQEVFAQVKQIYKTPPIKDFGGFNFSQILPDPSKPSKRSFIEDLLFNKVTLADAGFIKQYGDCLGDIAARDLICAQKFNGLTVLPPLLTDEMIAQYTSALLAGTITSGWTFGAGAALQIPFAMQMAYRFNGIGVTQNVLYENQKLIANQFNSAIGKIQDSLSSTASALGKLQDVVNQNAQALNTLVKQLSSNFGAISSVLNDILSRLDPPEAEVQIDRLITGRLQSLQTYVTQQLIRAAEIRASANLAATKMSECVLGQSKRVDFCGKGYHLMSFPQSAPHGVVFLHVTYVPAQEKNFTTAPAICHDGKAHFPREGVFVSNGTHWFVTQRNFYEPQIITTDNTFVSGNCDVVIGIVNNTVYDPLQPELDSFKEELDKYFKNHTSPDVDLGDISGINASVVNIQKEIDRLNEVAKNLNESLIDLQELGKYEQYIKGSGRENLYFQGGGGSGYIPEAPRDGQAYVRKDGEWVLLSTFLGHHHHHHHH

SEQ ID NO: 5581 - protein, 1281 aa, Artificial Sequence
  Description of Artificial Sequence: Synthetic polypeptide
MGILPSPGMPALLSLVSLLSVLLMGCVAETGTQCVNLTTRTQLPPAYTNSFTRGVYYPDKVFRSSVLHSTQDLFLPFFSNVTWFHAIHVSGTNGTKRFDNPVLPFNDGVYFASTEKSNIIRGWIFGTTLDSKTQSLLIVNNATNVVIKVCEFQFCNDPFLGVYYHKNNKSWMESEFRVYSSANNCTFEYVSQPFLMDLEGKQGNFKNLREFVFKNIDGYFKIYSKHTPINLVRDLPQGFSALEPLVDLPIGINITRFQTLLALHRSYLTPGDSSSGWTAGAAAYYVGYLQPRTFLLKYNENGTITDAVDCALDPLSETKCTLKSFTVEKGIYQTSNFRVQPTESIVRFPNITNLCPFGEVFNATRFASVYAWNRKRISNCVADYSVLYNSASFSTFKCYGVSPTKLNDLCFTNVYADSFVIRGDEVRQIAPGQTGKIADYNYKLPDDFTGCVIAWNSNKLDSKVGGNYNYLYRLFRKSNLKPFERDISTEIYQAGSTPCNGVEGFNCYFPLQSYGFQPTNGVGYQPYRVVVLSFELLHAPATVCGPKKSTNLVKNKCVNFNFNGLTGTGVLTESNKKFLPFQQFGRDIADTTDAVRDPQTLEILDITPCSFGGVSVITPGTNTSNQVAVLYQDVNCTEVPVAIHADQLTPTWRVYSTGSNVFQTRAGCLIGAEHVNNSYECDIPIGAGICASYQTQTNSPSGAGSVASQSIIAYTMSLGAENSVAYSNNSIAIPTNFTISVTTEILPVSMTKTSVDCTMYICGDSTECSNLLLQYGSFCTQLNRALTGIAVEQDKNTQEVFAQVKQIYKTPPIKDFGGFNFSQILPDPSKPSKRSFIEDLLFNKVTLADAGFIKQYGDCLGDIAARDLICAQKFNGLTVLPPLLTDEMIAQYTSALLAGTITSGWTFGAGAALQIPFAMQMAYRFNGIGVTQNVLYENQKLIANQFNSAIGKIQDSLSSTASALGKLQDVVNQNAQALNTLVKQLSSNFGAISSVLNDILSRLDPPEAEVQIDRLITGRLQSLQTYVTQQLIRAAEIRASANLAATKMSECVLGQSKRVDFCGKGYHLMSFPQSAPHGVVFLHVTYVPAQEKNFTTAPAICHDGKAHFPREGVFVSNGTHWFVTQRNFYEPQIITTDNTFVSGNCDVVIGIVNNTVYDPLQPELDSFKEELDKYFKNHTSPDVDLGDISGINASVVNIQKEIDRLNEVAKNLNESLIDLQELGKYEQYIKGSGRENLYFQGGGGSGYIPEAPRDGQAYVRKDGEWVLLSTFLGHHHHHHHH

SEQ ID NO: 5582 - protein, 1281 aa, Artificial Sequence
  Description of Artificial Sequence: Synthetic polypeptide
MGILPSPGMPALLSLVSLLSVLLMGCVAETGTQCVNLTTRTQLPPAYTNSFTRGVYYPDKVFRSSVLHSTQDLFLPFFSNVTWFHAIHVSGTNGTKRFDNPVLPFNDGVYFASTEKSNIIRGWIFGTTLDSKTQSLLIVNNATNVVIKVCEFQFCNDPFLGVYYHKNNKSWMESEFRVYSSANNCTFEYVSQPFLMDLEGKQGNFKNLREFVFKNIDGYFKIYSKHTPINLVRDLPQGFSALEPLVDLPIGINITRFQTLLALHRSYLTPGDSSSGWTAGAAAYYVGYLQPRTFLLKYNENGTITDAVDCALDPLSETKCTLKSFTVEKGIYQTSNFRVQPTESIVRFPNITNLCPFGEVFNATRFASVYAWNRKRISNCVADYSVLYNSASFSTFKCYGVSPTKLNDLCFTNVYADSFVIRGDEVRQIAPGQTGKIADYNYKLPDDFTGCVIAWNSNNLDSKVGGNYNYLYRLFRKSNLKPFERDISTEIYQAGSTPCNGVEGFNCYFPLQSYGFQPTNGVGYQPYRVVVLSFELLHAPATVCGPKKSTNLVKNKCVNFNFNGHTGTGVLTESNKKFLPFQQFGRDIADTTDAVRDPQTLEILDITPCSFGGVSVITPGTNTSNQVAVLYQDVNCTEVPVAIHADQLTPTWRVYSTGSNVFQTRAGCLIGAEHVNNSYECDIPIGAGICASYQTQTNSPSGAGSVASQSIIAYTMSLGAENSVAYSNNSIAIPTNFTISVTTEILPVSMTKTSVDCTMYICGDSTECSNLLLQYGSFCTQLNRALTGIAVEQDKNTQEVFAQVKQIYKTPPIKDFGGFNFSQILPDPSKPSKRSFIEDLLFNKVTLADAGFIKQYGDCLGDIAARDLICAQKFNGLTVLPPLLTDEMIAQYTSALLAGTITSGWTFGAGAALQIPFAMQMAYRFNGIGVTQNVLYENQKLIANQFNSAIGKIQDSLSSTASALGKLQDVVNQNAQALNTLVKQLSSNFGAISSVLNDILSRLDPPEAEVQIDRLITGRLQSLQTYVTQQLIRAAEIRASANLAATKMSECVLGQSKRVDFCGKGYHLMSFPQSAPHGVVFLHVTYVPAQEKNFTTAPAICHDGKAHFPREGVFVSNGTHWFVTQRNFYEPQIITTDNTFVSGNCDVVIGIVNNTVYDPLQPELDSFKEELDKYFKNHTSPDVDLGDISGINASVVNIQKEIDRLNEVAKNLNESLIDLQELGKYEQYIKGSGRENLYFQGGGGSGYIPEAPRDGQAYVRKDGEWVLLSTFLGHHHHHHHH

SEQ ID NO: 5583 - protein, 1281 aa, Artificial Sequence
  Description of Artificial Sequence: Synthetic polypeptide
MGILPSPGMPALLSLVSLLSVLLMGCVAETGTQCVNLTTRTQLPPAYTNSFTRGVYYPDKVFRSSVLHSTQDLFLPFFSNVTWFHAIHVSGTNGTKRFDNPVLPFNDGVYFASTEKSNIIRGWIFGTTLDSKTQSLLIVNNATNVVIKVCEFQFCNDPFLGVYYHKNNKSWMESEFRVYSSANNCTFEYVSQPFLMDLEGKQGNFKNLREFVFKNIDGYFKIYSKHTPINLVRDLPQGFSALEPLVDLPIGINITRFQTLLALHRSYLTPGDSSSGWTAGAAAYYVGYLQPRTFLLKYNENGTITDAVDCALDPLSETKCTLKSFTVEKGIYQTSNFRVQPTESIVRFPNITNLCPFGEVFNATRFASVYAWNRKRISNCVADYSVLYNSASFSTFKCYGVSPTKLNDLCFTNVYADSFVIRGDEVRQIAPGQTGKIADYNYKLPDDFTGCVIAWNSNNLDSKVGGNYNYLYRLFRKSNLKPFERDISTEIYQAGSTPCNGVEGFNSYFPLQSYGFQPTNGVGYQPYRVVVLSFELLHAPATVCGPKKSTNLVKNKCVNFNFNGLTGTGVLTESNKKFLPFQQFGRDIADTTDAVRDPQTLEILDITPCSFGGVSVITPGTNTSNQVAVLYQDVNCTEVPVAIHADQLTPTWRVYSTGSNVFQTRAGCLIGAEHVNNSYECDIPIGAGICASYQTQTNSPSGAGSVASQSIIAYTMSLGAENSVAYSNNSIAIPTNFTISVTTEILPVSMTKTSVDCTMYICGDSTECSNLLLQYGSFCTQLNRALTGIAVEQDKNTQEVFAQVKQIYKTPPIKDFGGFNFSQILPDPSKPSKRSFIEDLLFNKVTLADAGFIKQYGDCLGDIAARDLICAQKFNGLTVLPPLLTDEMIAQYTSALLAGTITSGWTFGAGAALQIPFAMQMAYRFNGIGVTQNVLYENQKLIANQFNSAIGKIQDSLSSTASALGKLQDVVNQNAQALNTLVKQLSSNFGAISSVLNDILSRLDPPEAEVQIDRLITGRLQSLQTYVTQQLIRAAEIRASANLAATKMSECVLGQSKRVDFCGKGYHLMSFPQSAPHGVVFLHVTYVPAQEKNFTTAPAICHDGKAHFPREGVFVSNGTHWFVTQRNFYEPQIITTDNTFVSGNCDVVIGIVNNTVYDPLQPELDSFKEELDKYFKNHTSPDVDLGDISGINASVVNIQKEIDRLNEVAKNLNESLIDLQELGKYEQYIKGSGRENLYFQGGGGSGYIPEAPRDGQAYVRKDGEWVLLSTFLGHHHHHHHH

SEQ ID NO: 5584 - protein, 1281 aa, Artificial Sequence
  Description of Artificial Sequence: Synthetic polypeptide
MGILPSPGMPALLSLVSLLSVLLMGCVAETGTQCVNLTTRTQLPPAYTNSFTRGVYYPDKVFRSSVLHSTQDLFLPFFSNVTWFHAIHVSGTNGTKRFDNPVLPFNDGVYFASTEKSNIIRGWIFGTTLDSKTQSLLIVNNATNVVIKVCEFQFCNDPFLGVYYHKNNKSWMESEFRVYSSANNCTFEYVSQPFLMDLEGKQGNFKNLREFVFKNIDGYFKIYSKHTPINLVRDLPQGFSALEPLVDLPIGINITRFQTLLALHRSYLTPGDSSSGWTAGAAAYYVGYLQPRTFLLKYNENGTITDAVDCALDPLSETKCTLKSFTVEKGIYQTSNFRVQPTESIVRFPNITNLCPFGEVFNATRFASVYAWNRKRISNCVADYSVLYNSASFSTFKCYGVSPTKLNDLCFTNVYADSFVIRGDEVRQIAPGQTGKIADYNYKLPDDFTGCVIAWNSNNLDSKVGGNYNYLYRLFRKSNLKPFRRDISTEIYQAGSTPCNGVEGFNCYFPLQSYGFQPTNGVGYQPYRVVVLSFELLHAPATVCGPKKSTNLVKNKCVNFNFNGLTGTGVLTESNKKFLPFQQFGRDIADTTDAVRDPQTLEILDITPCSFGGVSVITPGTNTSNQVAVLYQDVNCTEVPVAIHADQLTPTWRVYSTGSNVFQTRAGCLIGAEHVNNSYECDIPIGAGICASYQTQTNSPSGAGSVASQSIIAYTMSLGAENSVAYSNNSIAIPTNFTISVTTEILPVSMTKTSVDCTMYICGDSTECSNLLLQYGSFCTQLNRALTGIAVEQDKNTQEVFAQVKQIYKTPPIKDFGGFNFSQILPDPSKPSKRSFIEDLLFNKVTLADAGFIKQYGDCLGDIAARDLICAQKFNGLTVLPPLLTDEMIAQYTSALLAGTITSGWTFGAGAALQIPFAMQMAYRFNGIGVTQNVLYENQKLIANQFNSAIGKIQDSLSSTASALGKLQDVVNQNAQALNTLVKQLSSNFGAISSVLNDILSRLDPPEAEVQIDRLITGRLQSLQTYVTQQLIRAAEIRASANLAATKMSECVLGQSKRVDFCGKGYHLMSFPQSAPHGVVFLHVTYVPAQEKNFTTAPAICHDGKAHFPREGVFVSNGTHWFVTQRNFYEPQIITTDNTFVSGNCDVVIGIVNNTVYDPLQPELDSFKEELDKYFKNHTSPDVDLGDISGINASVVNIQKEIDRLNEVAKNLNESLIDLQELGKYEQYIKGSGRENLYFQGGGGSGYIPEAPRDGQAYVRKDGEWVLLSTFLGHHHHHHHH

SEQ ID NO: 5585 - protein, 1281 aa, Artificial Sequence
  Description of Artificial Sequence: Synthetic polypeptide
MGILPSPGMPALLSLVSLLSVLLMGCVAETGTQCVNLTTRTQLPPAYTNSFTRGVYYPDKVFRSSVLHSTQDLFLPFFSNVTWFHAIHVSGTNGTKRFDNPVLPFNDGVYFASTEKSNIIRGWIFGTTLDSKTQSLLIVNNATNVVIKVCEFQFCNDPFLGVYYHKNNKSWMESEFRVYSSANNCTFEYVSQPFLMDLEGKQGNFKNLREFVFKNIDGYFKIYSKHTPINLVRDLPQGFSALEPLVDLPIGINITRFQTLLALHRSYLTPGDSSSGWTAGAAAYYVGYLQPRTFLLKYNENGTITDAVDCALDPLSETKCTLKSFTVEKGIYQTSNFRVQPTESIVRFPNITNLCPFGEVFNATRFASVYAWNRKRISNCVADYSVLYNSASFSTFKCYGVSPTKLNDLCFTNVYADSFVIRGDEVRQIAPGQTGKIADYNYKLPDDFTGCVIAWNSNNLDSKVGGNYNYLYRLFRKSNLKPFERDISTETYQAGSTPCNGVEGFNCYFPLQSYGFQPTNGVGYQPYRVVVLSFELLHAPATVCGPKKSTNLVKNKCVNFNFNGLTGTGVLTESNKKFLPFQQFGRDIADTTDAVRDPQTLEILDITPCSFGGVSVITPGTNTSNQVAVLYQDVNCTEVPVAIHADQLTPTWRVYSTGSNVFQTRAGCLIGAEHVNNSYECDIPIGAGICASYQTQTNSPSGAGSVASQSIIAYTMSLGAENSVAYSNNSIAIPTNFTISVTTEILPVSMTKTSVDCTMYICGDSTECSNLLLQYGSFCTQLNRALTGIAVEQDKNTQEVFAQVKQIYKTPPIKDFGGFNFSQILPDPSKPSKRSFIEDLLFNKVTLADAGFIKQYGDCLGDIAARDLICAQKFNGLTVLPPLLTDEMIAQYTSALLAGTITSGWTFGAGAALQIPFAMQMAYRFNGIGVTQNVLYENQKLIANQFNSAIGKIQDSLSSTASALGKLQDVVNQNAQALNTLVKQLSSNFGAISSVLNDILSRLDPPEAEVQIDRLITGRLQSLQTYVTQQLIRAAEIRASANLAATKMSECVLGQSKRVDFCGKGYHLMSFPQSAPHGVVFLHVTYVPAQEKNFTTAPAICHDGKAHFPREGVFVSNGTHWFVTQRNFYEPQIITTDNTFVSGNCDVVIGIVNNTVYDPLQPELDSFKEELDKYFKNHTSPDVDLGDISGINASVVNIQKEIDRLNEVAKNLNESLIDLQELGKYEQYIKGSGRENLYFQGGGGSGYIPEAPRDGQAYVRKDGEWVLLSTFLGHHHHHHHH

SEQ ID NO: 5586 - protein, 1281 aa, Artificial Sequence
  Description of Artificial Sequence: Synthetic polypeptide
MGILPSPGMPALLSLVSLLSVLLMGCVAETGTQCVNLTTRTQLPPAYTNSFTRGVYYPDKVFRSSVLHSTQDLFLPFFSNVTWFHAIHVSGTNGTKRFDNPVLPFNDGVYFASTEKSNIIRGWIFGTTLDSKTQSLLIVNNATNVVIKVCEFQFCNDPFLGVYYHKNNKSWMESEFRVYSSANNCTFEYVSQPFLMDLEGKQGNFKNLREFVFKNIDGYFKIYSKHTPINLVRDLPQGFSALEPLVDLPIGINITRFQTLLALHRSYLTPGDSSSGWTAGAAAYYVGYLQPRTFLLKYNENGTITDAVDCALDPLSETKCTLKSFTVEKGIYQTSNFRVQPTESIVRFPAITNLCPFGEVFNATRFASVYAWNRKRISNCVADYSVLYNSASFSTFKCYGVSPTKLNDLCFTNVYADSFVIRGDEVRQIAPGQTGKIADYNYKLPDDFTGCVIAWNSNNLDSKVGGNYNYLYRLFRKSNLKPFERDISTEIYQAGSTPCNGVEGFNCYFPLQSYGFQPTNGVGYQPYRVVVLSFELLHAPATVCGPKKSTNLVKNKCVNFNFNGLTGTGVLTESNKKFLPFQQFGRDIADTTDAVRDPQTLEILDITPCSFGGVSVITPGTNTSNQVAVLYQDVNCTEVPVAIHADQLTPTWRVYSTGSNVFQTRAGCLIGAEHVNNSYECDIPIGAGICASYQTQTNSPSGAGSVASQSIIAYTMSLGAENSVAYSNNSIAIPTNFTISVTTEILPVSMTKTSVDCTMYICGDSTECSNLLLQYGSFCTQLNRALTGIAVEQDKNTQEVFAQVKQIYKTPPIKDFGGFNFSQILPDPSKPSKRSFIEDLLFNKVTLADAGFIKQYGDCLGDIAARDLICAQKFNGLTVLPPLLTDEMIAQYTSALLAGTITSGWTFGAGAALQIPFAMQMAYRFNGIGVTQNVLYENQKLIANQFNSAIGKIQDSLSSTASALGKLQDVVNQNAQALNTLVKQLSSNFGAISSVLNDILSRLDPPEAEVQIDRLITGRLQSLQTYVTQQLIRAAEIRASANLAATKMSECVLGQSKRVDFCGKGYHLMSFPQSAPHGVVFLHVTYVPAQEKNFTTAPAICHDGKAHFPREGVFVSNGTHWFVTQRNFYEPQIITTDNTFVSGNCDVVIGIVNNTVYDPLQPELDSFKEELDKYFKNHTSPDVDLGDISGINASVVNIQKEIDRLNEVAKNLNESLIDLQELGKYEQYIKGSGRENLYFQGGGGSGYIPEAPRDGQAYVRKDGEWVLLSTFLGHHHHHHHH

SEQ ID NO: 5587 - protein, 1281 aa, Artificial Sequence
  Description of Artificial Sequence: Synthetic polypeptide
MGILPSPGMPALLSLVSLLSVLLMGCVAETGTQCVNLTTRTQLPPAYTNSFTRGVYYPDKVFRSSVLHSTQDLFLPFFSNVTWFHAIHVSGTNGTKRFDNPVLPFNDGVYFASTEKSNIIRGWIFGTTLDSKTQSLLIVNNATNVVIKVCEFQFCNDPFLGVYYHKNNKSWMESEFRVYSSANNCTFEYVSQPFLMDLEGKQGNFKNLREFVFKNIDGYFKIYSKHTPINLVRDLPQGFSALEPLVDLPIGINITRFQTLLALHRSYLTPGDSSSGWTAGAAAYYVGYLQPRTFLLKYNENGTITDAVDCALDPLSETKCTLKSFTVEKGIYQTSNFRVQPTESIVRFPNITNLCPFGEVFNATRFASVYAWNRKRISNCVADYSVLYQSASFSTFKCYGVSPTKLNDLCFTNVYADSFVIRGDEVRQIAPGQTGKIADYNYKLPDDFTGCVIAWNSNNLDSKVGGNYNYLYRLFRKSNLKPFERDISTEIYQAGSTPCNGVEGFNCYFPLQSYGFQPTNGVGYQPYRVVVLSFELLHAPATVCGPKKSTNLVKNKCVNFNFNGLTGTGVLTESNKKFLPFQQFGRDIADTTDAVRDPQTLEILDITPCSFGGVSVITPGTNTSNQVAVLYQDVNCTEVPVAIHADQLTPTWRVYSTGSNVFQTRAGCLIGAEHVNNSYECDIPIGAGICASYQTQTNSPSGAGSVASQSIIAYTMSLGAENSVAYSNNSIAIPTNFTISVTTEILPVSMTKTSVDCTMYICGDSTECSNLLLQYGSFCTQLNRALTGIAVEQDKNTQEVFAQVKQIYKTPPIKDFGGFNFSQILPDPSKPSKRSFIEDLLFNKVTLADAGFIKQYGDCLGDIAARDLICAQKFNGLTVLPPLLTDEMIAQYTSALLAGTITSGWTFGAGAALQIPFAMQMAYRFNGIGVTQNVLYENQKLIANQFNSAIGKIQDSLSSTASALGKLQDVVNQNAQALNTLVKQLSSNFGAISSVLNDILSRLDPPEAEVQIDRLITGRLQSLQTYVTQQLIRAAEIRASANLAATKMSECVLGQSKRVDFCGKGYHLMSFPQSAPHGVVFLHVTYVPAQEKNFTTAPAICHDGKAHFPREGVFVSNGTHWFVTQRNFYEPQIITTDNTFVSGNCDVVIGIVNNTVYDPLQPELDSFKEELDKYFKNHTSPDVDLGDISGINASVVNIQKEIDRLNEVAKNLNESLIDLQELGKYEQYIKGSGRENLYFQGGGGSGYIPEAPRDGQAYVRKDGEWVLLSTFLGHHHHHHHH

SEQ ID NO: 5588 - protein, 1281 aa, Artificial Sequence
  Description of Artificial Sequence: Synthetic polypeptide
MGILPSPGMPALLSLVSLLSVLLMGCVAETGTQCVNLTTRTQLPPAYTNSFTRGVYYPDKVFRSSVLHSTQDLFLPFFSNVTWFHAIHVSGTNGTKRFDNPVLPFNDGVYFASTEKSNIIRGWIFGTTLDSKTQSLLIVNNATNVVIKVCEFQFCNDPFLGVYYHKNNKSWMESEFRVYSSANNCTFEYVSQPFLMDLEGKQGNFKNLREFVFKNIDGYFKIYSKHTPINLVRDLPQGFSALEPLVDLPIGINITRFQTLLALHRSYLTPGDSSSGWTAGAAAYYVGYLQPRTFLLKYNENGTITDAVDCALDPLSETKCTLKSFTVEKGIYQTSNFRVQPTESIVRFPNITNLCPFGEVFNATRFASVYAWNRKRISNCVADYSVLYNSASFSTFKCYGVSPTKLNDLCFTNVYADSFVIRGDEVRQIAPGQTGKIADYNYKLPDDFTGCVIAWNSNNLDSKRGGNYNYLYRLFRKSNLKPFERDISTEIYQAGSTPCNGVEGFNCYFPLQSYGFQPTNGVGYQPYRVVVLSFELLHAPATVCGPKKSTNLVKNKCVNFNFNGLTGTGVLTESNKKFLPFQQFGRDIADTTDAVRDPQTLEILDITPCSFGGVSVITPGTNTSNQVAVLYQDVNCTEVPVAIHADQLTPTWRVYSTGSNVFQTRAGCLIGAEHVNNSYECDIPIGAGICASYQTQTNSPSGAGSVASQSIIAYTMSLGAENSVAYSNNSIAIPTNFTISVTTEILPVSMTKTSVDCTMYICGDSTECSNLLLQYGSFCTQLNRALTGIAVEQDKNTQEVFAQVKQIYKTPPIKDFGGFNFSQILPDPSKPSKRSFIEDLLFNKVTLADAGFIKQYGDCLGDIAARDLICAQKFNGLTVLPPLLTDEMIAQYTSALLAGTITSGWTFGAGAALQIPFAMQMAYRFNGIGVTQNVLYENQKLIANQFNSAIGKIQDSLSSTASALGKLQDVVNQNAQALNTLVKQLSSNFGAISSVLNDILSRLDPPEAEVQIDRLITGRLQSLQTYVTQQLIRAAEIRASANLAATKMSECVLGQSKRVDFCGKGYHLMSFPQSAPHGVVFLHVTYVPAQEKNFTTAPAICHDGKAHFPREGVFVSNGTHWFVTQRNFYEPQIITTDNTFVSGNCDVVIGIVNNTVYDPLQPELDSFKEELDKYFKNHTSPDVDLGDISGINASVVNIQKEIDRLNEVAKNLNESLIDLQELGKYEQYIKGSGRENLYFQGGGGSGYIPEAPRDGQAYVRKDGEWVLLSTFLGHHHHHHHH

SEQ ID NO: 5589 - protein, 1281 aa, Artificial Sequence
  Description of Artificial Sequence: Synthetic polypeptide
MGILPSPGMPALLSLVSLLSVLLMGCVAETGTQCVNLTTRTQLPPAYTNSFTRGVYYPDKVFRSSVLHSTQDLFLPFFSNVTWFHAIHVSGTNGTKRFDNPVLPFNDGVYFASTEKSNIIRGWIFGTTLDSKTQSLLIVNNATNVVIKVCEFQFCNDPFLGVYYHKNNKSWMESEFRVYSSANNCTFEYVSQPFLMDLEGKQGNFKNLREFVFKNIDGYFKIYSKHTPINLVRDLPQGFSALEPLVDLPIGINITRFQTLLALHRSYLTPGDSSSGWTAGAAAYYVGYLQPRTFLLKYNENGTITDAVDCALDPLSETKCTLKSFTVEKGIYQTSNFRVQPTESIVRFPNITNLCPFGEVFNATRFASVYAWNRKRISNCVADYSVLYNSASFSTFKCYGVSPTKLNDLCFTNVYADSFVIRGDEVRQIAPGQTGKIADYNYKLPDDFTGCVIAWNSNNLDSKVGGNYNYLYRLFRKSNLKPFERDISTEIYQAGSTPCNGVEGFNCYFPLQSYGFQPTNGVGYQPYRVVVLSFELLEAPATVCGPKKSTNLVKNKCVNFNFNGLTGTGVLTESNKKFLPFQQFGRDIADTTDAVRDPQTLEILDITPCSFGGVSVITPGTNTSNQVAVLYQDVNCTEVPVAIHADQLTPTWRVYSTGSNVFQTRAGCLIGAEHVNNSYECDIPIGAGICASYQTQTNSPSGAGSVASQSIIAYTMSLGAENSVAYSNNSIAIPTNFTISVTTEILPVSMTKTSVDCTMYICGDSTECSNLLLQYGSFCTQLNRALTGIAVEQDKNTQEVFAQVKQIYKTPPIKDFGGFNFSQILPDPSKPSKRSFIEDLLFNKVTLADAGFIKQYGDCLGDIAARDLICAQKFNGLTVLPPLLTDEMIAQYTSALLAGTITSGWTFGAGAALQIPFAMQMAYRFNGIGVTQNVLYENQKLIANQFNSAIGKIQDSLSSTASALGKLQDVVNQNAQALNTLVKQLSSNFGAISSVLNDILSRLDPPEAEVQIDRLITGRLQSLQTYVTQQLIRAAEIRASANLAATKMSECVLGQSKRVDFCGKGYHLMSFPQSAPHGVVFLHVTYVPAQEKNFTTAPAICHDGKAHFPREGVFVSNGTHWFVTQRNFYEPQIITTDNTFVSGNCDVVIGIVNNTVYDPLQPELDSFKEELDKYFKNHTSPDVDLGDISGINASVVNIQKEIDRLNEVAKNLNESLIDLQELGKYEQYIKGSGRENLYFQGGGGSGYIPEAPRDGQAYVRKDGEWVLLSTFLGHHHHHHHH

SEQ ID NO: 5590 - protein, 1281 aa, Artificial Sequence
  Description of Artificial Sequence: Synthetic polypeptide
MGILPSPGMPALLSLVSLLSVLLMGCVAETGTQCVNLTTRTQLPPAYTNSFTRGVYYPDKVFRSSVLHSTQDLFLPFFSNVTWFHAIHVSGTNGTKRFDNPVLPFNDGVYFASTEKSNIIRGWIFGTTLDSKTQSLLIVNNATNVVIKVCEFQFCNDPFLGVYYHKNNKSWMESEFRVYSSANNCTFEYVSQPFLMDLEGKQGNFKNLREFVFKNIDGYFKIYSKHTPINLVRDLPQGFSALEPLVDLPIGINITRFQTLLALHRSYLTPGDSSSGWTAGAAAYYVGYLQPRTFLLKYNENGTITDAVDCALDPLSETKCTLKSFTVEKGIYQTSNFRVQPTESIVRFPNITNLCPFGEVFNATRFASVYAWNRKRISNCVADYSVLYNSASFSTFKCYGVSPTKLNDLCFTNVYADSFVIRGDEVRQIAPGQTGKIADYNYKLPDDFTGCVIAWNSNNLDSKVGGNYNYLYRLFRKSNLKPFERDISTEIYQAGSTPCNGVEGFNCYFPLQSYGFQPTNGVGYQPYRVVVLSFELLHAPATVCGPKKSTNLVKNKCVNFNFNGLTGTGVLTESNKKFLPFQQFGRDIADTTDAVRDPQTLEILDITPCSFGGVSVITPGTNTSNQVAVLYQDVNCTEVPVAIHADQLTPTWRVYSTGSNVFQTRAGCLIGAEHVNNSYECDIPIGAGICASYQTQTNSPSGAGSVASQSIIAYTMSLGAENSVAYSNNSIAIPTNFTISVTTEILPVSMTKTSVDCTMYICGDSTECSNLLLQYGSFCTQLNRALTGIAVEQDKNTQEVFAQVKHIYKTPPIKDFGGFNFSQILPDPSKPSKRSFIEDLLFNKVTLADAGFIKQYGDCLGDIAARDLICAQKFNGLTVLPPLLTDEMIAQYTSALLAGTITSGWTFGAGAALQIPFAMQMAYRFNGIGVTQNVLYENQKLIANQFNSAIGKIQDSLSSTASALGKLQDVVNQNAQALNTLVKQLSSNFGAISSVLNDILSRLDPPEAEVQIDRLITGRLQSLQTYVTQQLIRAAEIRASANLAATKMSECVLGQSKRVDFCGKGYHLMSFPQSAPHGVVFLHVTYVPAQEKNFTTAPAICHDGKAHFPREGVFVSNGTHWFVTQRNFYEPQIITTDNTFVSGNCDVVIGIVNNTVYDPLQPELDSFKEELDKYFKNHTSPDVDLGDISGINASVVNIQKEIDRLNEVAKNLNESLIDLQELGKYEQYIKGSGRENLYFQGGGGSGYIPEAPRDGQAYVRKDGEWVLLSTFLGHHHHHHHH

SEQ ID NO: 5591 - protein, 1281 aa, Artificial Sequence
  Description of Artificial Sequence: Synthetic polypeptide
MGILPSPGMPALLSLVSLLSVLLMGCVAETGTQCVNLTTRTQLPPAYTNSFTRGVYYPDKVFRSSVLHSTQDLFLPFFSNVTWFHAIHVSGTNGTKRFDNPVLPFNDGVYFASTEKSNIIRGWIFGTTLDSKTQSLLIVNNATNVVIKVCEFQFCNDPFLGVYYHKNNKSWMESEFRVYSSANNCTFEYVSQPFLMDLEGKQGNFKNLREFVFKNIDGYFKIYSKHTPINLVRDLPQGFSALEPLVDLPIGINITRFQTLLALHRSYLTPGDSSSGWTAGAAAYYVGYLQPRTFLLKYNENGTITDAVDCALDPLSETKCTLKSFTVEKGIYQTSNFRVQPTESIVRFPNITNLCPFGEVFNATRFASVYAWNRKRISNCVADYSVLYNSASFSTFKCYGVSPTKLNDLCFTNVYADSFVIRGDEVRQIAPGQTGKIADYNYKLPDDFTGCVIAWNSNNLDSKVGGNYNYLYRLFRKSNLKPFERDISTEIYQAGSTPCNGVEGFNCYFPLQSYGFQPTNGVGYQPYRVVVLSFELLDAPATVCGPKKSTNLVKNKCVNFNFNGLTGTGVLTESNKKFLPFQQFGRDIADTTDAVRDPQTLEILDITPCSFGGVSVITPGTNTSNQVAVLYQDVNCTEVPVAIHADQLTPTWRVYSTGSNVFQTRAGCLIGAEHVNNSYECDIPIGAGICASYQTQTNSPSGAGSVASQSIIAYTMSLGAENSVAYSNNSIAIPTNFTISVTTEILPVSMTKTSVDCTMYICGDSTECSNLLLQYGSFCTQLNRALTGIAVEQDKNTQEVFAQVKQIYKTPPIKDFGGFNFSQILPDPSKPSKRSFIEDLLFNKVTLADAGFIKQYGDCLGDIAARDLICAQKFNGLTVLPPLLTDEMIAQYTSALLAGTITSGWTFGAGAALQIPFAMQMAYRFNGIGVTQNVLYENQKLIANQFNSAIGKIQDSLSSTASALGKLQDVVNQNAQALNTLVKQLSSNFGAISSVLNDILSRLDPPEAEVQIDRLITGRLQSLQTYVTQQLIRAAEIRASANLAATKMSECVLGQSKRVDFCGKGYHLMSFPQSAPHGVVFLHVTYVPAQEKNFTTAPAICHDGKAHFPREGVFVSNGTHWFVTQRNFYEPQIITTDNTFVSGNCDVVIGIVNNTVYDPLQPELDSFKEELDKYFKNHTSPDVDLGDISGINASVVNIQKEIDRLNEVAKNLNESLIDLQELGKYEQYIKGSGRENLYFQGGGGSGYIPEAPRDGQAYVRKDGEWVLLSTFLGHHHHHHHH

SEQ ID NO: 5592 - protein, 1281 aa, Artificial Sequence
  Description of Artificial Sequence: Synthetic polypeptide
MGILPSPGMPALLSLVSLLSVLLMGCVAETGTQCVNLTTRTQLPPAYTNSFTRGVYYPDKVFRSSVLHSTQDLFLPFFSNVTWFHAIHVSGTNGTKRFDNPVLPFNDGVYFASTEKSNIIRGWIFGTTLDSKTQSLLIVNNATNVVIKVCEFQFCNDPFLGVYYHKNNKSWMESEFRVYSSANNCTFEYVSQPFLMDLEGKQGNFKNLREFVFKNIDGYFKIYSKHTPINLVRDLPQGFSALEPLVDLPIGINITRFQTLLALHRSYLTPGDSSSGWTAGAAAYYVGYLQPRTFLLKYNENGTITDAVDCALDPLSETKCTLKSFTVEKGIYQTSNFRVQPTESIVRFPNITNLCPFGEVFNATRFASVYAWNRKRISNCVADYSVLYNSASFSTFKCYGVSPTKLNDLCFTNVYADSFVIRGDEVRQIAPGQTGKIADYNYKLPDDFTGCVIAWNSNNLDSKVGGNYNYLYRLFRKSNLKPFERDISTNIYQAGSTPCNGVEGFNCYFPLQSYGFQPTNGVGYQPYRVVVLSFELLHAPATVCGPKKSTNLVKNKCVNFNFNGLTGTGVLTESNKKFLPFQQFGRDIADTTDAVRDPQTLEILDITPCSFGGVSVITPGTNTSNQVAVLYQDVNCTEVPVAIHADQLTPTWRVYSTGSNVFQTRAGCLIGAEHVNNSYECDIPIGAGICASYQTQTNSPSGAGSVASQSIIAYTMSLGAENSVAYSNNSIAIPTNFTISVTTEILPVSMTKTSVDCTMYICGDSTECSNLLLQYGSFCTQLNRALTGIAVEQDKNTQEVFAQVKQIYKTPPIKDFGGFNFSQILPDPSKPSKRSFIEDLLFNKVTLADAGFIKQYGDCLGDIAARDLICAQKFNGLTVLPPLLTDEMIAQYTSALLAGTITSGWTFGAGAALQIPFAMQMAYRFNGIGVTQNVLYENQKLIANQFNSAIGKIQDSLSSTASALGKLQDVVNQNAQALNTLVKQLSSNFGAISSVLNDILSRLDPPEAEVQIDRLITGRLQSLQTYVTQQLIRAAEIRASANLAATKMSECVLGQSKRVDFCGKGYHLMSFPQSAPHGVVFLHVTYVPAQEKNFTTAPAICHDGKAHFPREGVFVSNGTHWFVTQRNFYEPQIITTDNTFVSGNCDVVIGIVNNTVYDPLQPELDSFKEELDKYFKNHTSPDVDLGDISGINASVVNIQKEIDRLNEVAKNLNESLIDLQELGKYEQYIKGSGRENLYFQGGGGSGYIPEAPRDGQAYVRKDGEWVLLSTFLGHHHHHHHH

SEQ ID NO: 5593 - protein, 1281 aa, Artificial Sequence
  Description of Artificial Sequence: Synthetic polypeptide
MGILPSPGMPALLSLVSLLSVLLMGCVAETGTQCVNLTTRTQLPPAYTNSFTRGVYYPDKVFRSSVLHSTQDLFLPFFSNVTWFHAIHVSGTNGTKRFDNPVLPFNDGVYFASTEKSNIIRGWIFGTTLDSKTQSLLIVNNATNVVIKVCEFQFCNDPFLGVYYHKNNKSWMESEFRVYSSANNCTFEYVSQPFLMDLEGKQGNFKNLREFVFKNIDGYFKIYSKHTPINLVRDLPQGFSALEPLVDLPIGINITRFQTLLALHRSYLTPGDSSSGWTAGAAAYYVGYLQPRTFLLKYNENGTITDAVDCALDPLSETKCTLKSFTVEKGIYQTSNFRVQPTESIVRFPNITNLCPFGEVFNATRFASVYAWNRKRISNCVADYSVLYNSASFSTFKCYGVSPTKLNDLCFTNVYADTFVIRGDEVRQIAPGQTGKIADYNYKLPDDFTGCVIAWNSNNLDSKVGGNYNYLYRLFRKSNLKPFERDISTEIYQAGSTPCNGVEGFNCYFPLQSYGFQPTNGVGYQPYRVVVLSFELLHAPATVCGPKKSTNLVKNKCVNFNFNGLTGTGVLTESNKKFLPFQQFGRDIADTTDAVRDPQTLEILDITPCSFGGVSVITPGTNTSNQVAVLYQDVNCTEVPVAIHADQLTPTWRVYSTGSNVFQTRAGCLIGAEHVNNSYECDIPIGAGICASYQTQTNSPSGAGSVASQSIIAYTMSLGAENSVAYSNNSIAIPTNFTISVTTEILPVSMTKTSVDCTMYICGDSTECSNLLLQYGSFCTQLNRALTGIAVEQDKNTQEVFAQVKQIYKTPPIKDFGGFNFSQILPDPSKPSKRSFIEDLLFNKVTLADAGFIKQYGDCLGDIAARDLICAQKFNGLTVLPPLLTDEMIAQYTSALLAGTITSGWTFGAGAALQIPFAMQMAYRFNGIGVTQNVLYENQKLIANQFNSAIGKIQDSLSSTASALGKLQDVVNQNAQALNTLVKQLSSNFGAISSVLNDILSRLDPPEAEVQIDRLITGRLQSLQTYVTQQLIRAAEIRASANLAATKMSECVLGQSKRVDFCGKGYHLMSFPQSAPHGVVFLHVTYVPAQEKNFTTAPAICHDGKAHFPREGVFVSNGTHWFVTQRNFYEPQIITTDNTFVSGNCDVVIGIVNNTVYDPLQPELDSFKEELDKYFKNHTSPDVDLGDISGINASVVNIQKEIDRLNEVAKNLNESLIDLQELGKYEQYIKGSGRENLYFQGGGGSGYIPEAPRDGQAYVRKDGEWVLLSTFLGHHHHHHHH

SEQ ID NO: 5594 - protein, 1281 aa, Artificial Sequence
  Description of Artificial Sequence: Synthetic polypeptide
MGILPSPGMPALLSLVSLLSVLLMGCVAETGTQCVNLTTRTQLPPAYTNSFTRGVYYPDKVFRSSVLHSTQDLFLPFFSNVTWFHAIHVSGTNGTKRFDNPVLPFNDGVYFASTEKSNIIRGWIFGTTLDSKTQSLLIVNNATNVVIKVCEFQFCNDPFLGVYYHKNNKSWMESEFRVYSSANNCTFEYVSQPFLMDLEGKQGNFKNLREFVFKNIDGYFKIYSKHTPINLVRDLPQGFSALEPLVDLPIGINITRFQTLLALHRSYLTPGDSSSGWTAGAAAYYVGYLQPRTFLLKYNENGTITDAVDCALDPLSETKCTLKSFTVEKGIYQTSNFRVQPTESIVRFPNITNLCPFGEVFNATRFASVYAWNRKRISNCVADYSVLYNSASFSTFKCYGVSPTKLNDLCFTNVYADSFVIRGDEVRQIAPGQTGKIADYNYKLPDDFTGCVIAWNSNNLDSKVGGNYNYLYRLFRKSNLKPFERDISTEIYQAGSTPCNGVEGFNCYFPLQSYGFQPTNGVGYQPYRVVVLSFELLHAPATVCGPKKSTNLVKNKCVNFNFNGLTGTGVLTESNKKFLPFQQFGRDIADTTDAVRDPQTLEILDITPCSFGGVSVITPGTNTSNQVAVLYQDVNCTEVPVAIHADQLTPTWRVYSTGSNVFQTRAGCLIGAEHVNNSYECDIPIGAGICASYQTQTNSPSGAGSVASQSIIAYTMSLGAENSVAYSNNSIAIPTNFTISVTTEILPVSMTKTSVDCTMYICGDSTECSNLLLQYGSFCTQLNRALTGIAVEQDKNTQEVFAQVKQIYKTPPIKDFGGFNFSQILPDPSKPSKRSFIEDLLFNKVTLADAGFIKQYGDCLGDIAARDLICAQKFNGLTVLPPLLTDELIAQYTSALLAGTITSGWTFGAGAALQIPFAMQMAYRFNGIGVTQNVLYENQKLIANQFNSAIGKIQDSLSSTASALGKLQDVVNQNAQALNTLVKQLSSNFGAISSVLNDILSRLDPPEAEVQIDRLITGRLQSLQTYVTQQLIRAAEIRASANLAATKMSECVLGQSKRVDFCGKGYHLMSFPQSAPHGVVFLHVTYVPAQEKNFTTAPAICHDGKAHFPREGVFVSNGTHWFVTQRNFYEPQIITTDNTFVSGNCDVVIGIVNNTVYDPLQPELDSFKEELDKYFKNHTSPDVDLGDISGINASVVNIQKEIDRLNEVAKNLNESLIDLQELGKYEQYIKGSGRENLYFQGGGGSGYIPEAPRDGQAYVRKDGEWVLLSTFLGHHHHHHHH

SEQ ID NO: 5595 - protein, 1281 aa, Artificial Sequence
  Description of Artificial Sequence: Synthetic polypeptide
MGILPSPGMPALLSLVSLLSVLLMGCVAETGTQCVNLTTRTQLPPAYTNSFTRGVYYPDKVFRSSVLHSTQDLFLPFFSNVTWFHAIHVSGTNGTKRFDNPVLPFNDGVYFASTEKSNIIRGWIFGTTLDSKTQSLLIVNNATNVVIKVCEFQFCNDPFLGVYYHKNNKSWMESEFRVYSSANNCTFEYVSQPFLMDLEGKQGNFKNLREFVFKNIDGYFKIYSKHTPINLVRDLPQGFSALEPLVDLPIGINITRFQTLLALHRSYLTPGDSSSGWTAGAAAYYVGYLQPRTFLLKYNENGTITDAVDCALDPLSETKCTLKSFTVEKGIYQTSNFRVQPTESIVRFPNITNLCPFGEVFNATRFASVYAWNRKRISNCVADYSVLYNSASFSTFKCYGVSPTKLNDLCFTNVYADSFVIRGDEVRQIAPGQTGKIADYNYKLPDDFTGCVIAWNSNNLDSKQGGNYNYLYRLFRKSNLKPFERDISTEIYQAGSTPCNGVEGFNCYFPLQSYGFQPTNGVGYQPYRVVVLSFELLHAPATVCGPKKSTNLVKNKCVNFNFNGLTGTGVLTESNKKFLPFQQFGRDIADTTDAVRDPQTLEILDITPCSFGGVSVITPGTNTSNQVAVLYQDVNCTEVPVAIHADQLTPTWRVYSTGSNVFQTRAGCLIGAEHVNNSYECDIPIGAGICASYQTQTNSPSGAGSVASQSIIAYTMSLGAENSVAYSNNSIAIPTNFTISVTTEILPVSMTKTSVDCTMYICGDSTECSNLLLQYGSFCTQLNRALTGIAVEQDKNTQEVFAQVKQIYKTPPIKDFGGFNFSQILPDPSKPSKRSFIEDLLFNKVTLADAGFIKQYGDCLGDIAARDLICAQKFNGLTVLPPLLTDEMIAQYTSALLAGTITSGWTFGAGAALQIPFAMQMAYRFNGIGVTQNVLYENQKLIANQFNSAIGKIQDSLSSTASALGKLQDVVNQNAQALNTLVKQLSSNFGAISSVLNDILSRLDPPEAEVQIDRLITGRLQSLQTYVTQQLIRAAEIRASANLAATKMSECVLGQSKRVDFCGKGYHLMSFPQSAPHGVVFLHVTYVPAQEKNFTTAPAICHDGKAHFPREGVFVSNGTHWFVTQRNFYEPQIITTDNTFVSGNCDVVIGIVNNTVYDPLQPELDSFKEELDKYFKNHTSPDVDLGDISGINASVVNIQKEIDRLNEVAKNLNESLIDLQELGKYEQYIKGSGRENLYFQGGGGSGYIPEAPRDGQAYVRKDGEWVLLSTFLGHHHHHHHH

SEQ ID NO: 5596 - protein, 1281 aa, Artificial Sequence
  Description of Artificial Sequence: Synthetic polypeptide
MGILPSPGMPALLSLVSLLSVLLMGCVAETGTQCVNLTTRTQLPPAYTNSFTRGVYYPDKVFRSSVLHSTQDLFLPFFSNVTWFHAIHVSGTNGTKRFDNPVLPFNDGVYFASTEKSNIIRGWIFGTTLDSKTQSLLIVNNATNVVIKVCEFQFCNDPFLGVYYHKNNKSWMESEFRVYSSANNCTFEYVSQPFLMDLEGKQGNFKNLREFVFKNIDGYFKIYSKHTPINLVRDLPQGFSALEPLVDLPIGINITRFQTLLALHRSYLTPGDSSSGWTAGAAAYYVGYLQPRTFLLKYNENGTITDAVDCALDPLSETKCTLKSFTVEKGIYQTSNFRVQPTESIVRFPNITNLCPFGEVFNATRFASVYAWNRKRISNCVADYSVLYNSASFSTFKCYGVSPTKLNDLCFTNVYADSFVIRGDEVRQIAPGQTGKIADYNYKLPDDFTGCVIAWNSNNLDSKVGGNYNYLYRLFRKSNLKPFERDISTEIYQAGSTPCNGVEGFNCYFPLQSYGFQPTNGVGYQPYRVVVLSFELLCAPATVCGPKKSTNLVKNKCVNFNFNGLTGTGVLTESNKKFLPFQQFGRDIADTTDAVRDPQTLEILDITPCSFGGVSVITPGTNTSNQVAVLYQDVNCTEVPVAIHADQLTPTWRVYSTGSNVFQTRAGCLIGAEHVNNSYECDIPIGAGICASYQTQTNSPSGAGSVASQSIIAYTMSLGAENSVAYSNNSIAIPTNFTISVTTEILPVSMTKTSVDCTMYICGDSTECSNLLLQYGSFCTQLNRALTGIAVEQDKNTQEVFAQVKQIYKTPPIKDFGGFNFSQILPDPSKPSKRSFIEDLLFNKVTLADAGFIKQYGDCLGDIAARDLICAQKFNGLTVLPPLLTDEMIAQYTSALLAGTITSGWTFGAGAALQIPFAMQMAYRFNGIGVTQNVLYENQKLIANQFNSAIGKIQDSLSSTASALGKLQDVVNQNAQALNTLVKQLSSNFGAISSVLNDILSRLDPPEAEVQIDRLITGRLQSLQTYVTQQLIRAAEIRASANLAATKMSECVLGQSKRVDFCGKGYHLMSFPQSAPHGVVFLHVTYVPAQEKNFTTAPAICHDGKAHFPREGVFVSNGTHWFVTQRNFYEPQIITTDNTFVSGNCDVVIGIVNNTVYDPLQPELDSFKEELDKYFKNHTSPDVDLGDISGINASVVNIQKEIDRLNEVAKNLNESLIDLQELGKYEQYIKGSGRENLYFQGGGGSGYIPEAPRDGQAYVRKDGEWVLLSTFLGHHHHHHHH

SEQ ID NO: 5597 - protein, 1281 aa, Artificial Sequence
  Description of Artificial Sequence: Synthetic polypeptide
MGILPSPGMPALLSLVSLLSVLLMGCVAETGTQCVNLTTRTQLPPAYTNSFTRGVYYPDKVFRSSVLHSTQDLFLPFFSNVTWFHAIHVSGTNGTKRFDNPVLPFNDGVYFASTEKSNIIRGWIFGTTLDSKTQSLLIVNNATNVVIKVCEFQFCNDPFLGVYYHKNNKSWMESEFRVYSSANNCTFEYVSQPFLMDLEGKQGNFKNLREFVFKNIDGYFKIYSKHTPINLVRDLPQGFSALEPLVDLPIGINITRFQTLLALHRSYLTPGDSSSGWTAGAAAYYVGYLQPRTFLLKYNENGTITDAVDCALDPLSETKCTLKSFTVEKGIYQTSNFRVQPTESIVRFPNITNLCPFGEVFNATRFASVYAWNRKRISNCVANYSVLYNSASFSTFKCYGVSPTKLNDLCFTNVYADSFVIRGDEVRQIAPGQTGKIADYNYKLPDDFTGCVIAWNSNNLDSKVGGNYNYLYRLFRKSNLKPFERDISTEIYQAGSTPCNGVEGFNCYFPLQSYGFQPTNGVGYQPYRVVVLSFELLHAPATVCGPKKSTNLVKNKCVNFNFNGLTGTGVLTESNKKFLPFQQFGRDIADTTDAVRDPQTLEILDITPCSFGGVSVITPGTNTSNQVAVLYQDVNCTEVPVAIHADQLTPTWRVYSTGSNVFQTRAGCLIGAEHVNNSYECDIPIGAGICASYQTQTNSPSGAGSVASQSIIAYTMSLGAENSVAYSNNSIAIPTNFTISVTTEILPVSMTKTSVDCTMYICGDSTECSNLLLQYGSFCTQLNRALTGIAVEQDKNTQEVFAQVKQIYKTPPIKDFGGFNFSQILPDPSKPSKRSFIEDLLFNKVTLADAGFIKQYGDCLGDIAARDLICAQKFNGLTVLPPLLTDEMIAQYTSALLAGTITSGWTFGAGAALQIPFAMQMAYRFNGIGVTQNVLYENQKLIANQFNSAIGKIQDSLSSTASALGKLQDVVNQNAQALNTLVKQLSSNFGAISSVLNDILSRLDPPEAEVQIDRLITGRLQSLQTYVTQQLIRAAEIRASANLAATKMSECVLGQSKRVDFCGKGYHLMSFPQSAPHGVVFLHVTYVPAQEKNFTTAPAICHDGKAHFPREGVFVSNGTHWFVTQRNFYEPQIITTDNTFVSGNCDVVIGIVNNTVYDPLQPELDSFKEELDKYFKNHTSPDVDLGDISGINASVVNIQKEIDRLNEVAKNLNESLIDLQELGKYEQYIKGSGRENLYFQGGGGSGYIPEAPRDGQAYVRKDGEWVLLSTFLGHHHHHHHH

SEQ ID NO: 5598 - protein, 1281 aa, Artificial Sequence
  Description of Artificial Sequence: Synthetic polypeptide
MGILPSPGMPALLSLVSLLSVLLMGCVAETGTQCVNLTTRTQLPPAYTNSFTRGVYYPDKVFRSSVLHSTQDLFLPFFSNVTWFHAIHVSGTNGTKRFDNPVLPFNDGVYFASTEKSNIIRGWIFGTTLDSKTQSLLIVNNATNVVIKVCEFQFCNDPFLGVYYHKNNKSWMESEFRVYSSANNCTFEYVSQPFLMDLEGKQGNFKNLREFVFKNIDGYFKIYSKHTPINLVRDLPQGFSALEPLVDLPIGINITRFQTLLALHRSYLTPGDSSSGWTAGAAAYYVGYLQPRTFLLKYNENGTITDAVDCALDPLSETKCTLKSFTVEKGIYQTSNFRVQPTESIVRFPNITNLCPFGEVFNATRFASVYAWNRKRISNCVADYSVLYNSASFSTFKCYGVSPTKLNDLCFTNVYADSFVIRGDEVRQIAPGQTGKIADYNYKLPDDFTGCVIAWNSNNLDSKVGGNYNYLYRLFRKSNLKPFERDISTEIYQAGSTPCNGVEGFNCYFPLQSYGFQPTNGVGYQPYRVVVLSFELLHYPATVCGPKKSTNLVKNKCVNFNFNGLTGTGVLTESNKKFLPFQQFGRDIADTTDAVRDPQTLEILDITPCSFGGVSVITPGTNTSNQVAVLYQDVNCTEVPVAIHADQLTPTWRVYSTGSNVFQTRAGCLIGAEHVNNSYECDIPIGAGICASYQTQTNSPSGAGSVASQSIIAYTMSLGAENSVAYSNNSIAIPTNFTISVTTEILPVSMTKTSVDCTMYICGDSTECSNLLLQYGSFCTQLNRALTGIAVEQDKNTQEVFAQVKQIYKTPPIKDFGGFNFSQILPDPSKPSKRSFIEDLLFNKVTLADAGFIKQYGDCLGDIAARDLICAQKFNGLTVLPPLLTDEMIAQYTSALLAGTITSGWTFGAGAALQIPFAMQMAYRFNGIGVTQNVLYENQKLIANQFNSAIGKIQDSLSSTASALGKLQDVVNQNAQALNTLVKQLSSNFGAISSVLNDILSRLDPPEAEVQIDRLITGRLQSLQTYVTQQLIRAAEIRASANLAATKMSECVLGQSKRVDFCGKGYHLMSFPQSAPHGVVFLHVTYVPAQEKNFTTAPAICHDGKAHFPREGVFVSNGTHWFVTQRNFYEPQIITTDNTFVSGNCDVVIGIVNNTVYDPLQPELDSFKEELDKYFKNHTSPDVDLGDISGINASVVNIQKEIDRLNEVAKNLNESLIDLQELGKYEQYIKGSGRENLYFQGGGGSGYIPEAPRDGQAYVRKDGEWVLLSTFLGHHHHHHHH

SEQ ID NO: 5599 - protein, 1281 aa, Artificial Sequence
  Description of Artificial Sequence: Synthetic polypeptide
MGILPSPGMPALLSLVSLLSVLLMGCVAETGTQCVNLTTRTQLPPAYTNSFTRGVYYPDKVFRSSVLHSTQDLFLPFFSNVTWFHAIHVSGTNGTKRFDNPVLPFNDGVYFASTEKSNIIRGWIFGTTLDSKTQSLLIVNNATNVVIKVCEFQFCNDPFLGVYYHKNNKSWMESEFRVYSSANNCTFEYVSQPFLMDLEGKQGNFKNLREFVFKNIDGYFKIYSKHTPINLVRDLPQGFSALEPLVDLPIGINITRFQTLLALHRSYLTPGDSSSGWTAGAAAYYVGYLQPRTFLLKYNENGTITDAVDCALDPLSETKCTLKSFTVEKGIYQTSNFRVQPTESIVRFPNITNLCPFGEVFNATRFASVYAWNRKRISNCVADYSVLYNSASFSTFKCYGVSPTKLNDLCFTNVYADSFVIRGDEVRQIAPGQTGKIADYNYKLPDDFTGCVIAWNSNNLDSKVGGNYNYLYRLFRKSNLKPFERDIGTEIYQAGSTPCNGVEGFNCYFPLQSYGFQPTNGVGYQPYRVVVLSFELLHAPATVCGPKKSTNLVKNKCVNFNFNGLTGTGVLTESNKKFLPFQQFGRDIADTTDAVRDPQTLEILDITPCSFGGVSVITPGTNTSNQVAVLYQDVNCTEVPVAIHADQLTPTWRVYSTGSNVFQTRAGCLIGAEHVNNSYECDIPIGAGICASYQTQTNSPSGAGSVASQSIIAYTMSLGAENSVAYSNNSIAIPTNFTISVTTEILPVSMTKTSVDCTMYICGDSTECSNLLLQYGSFCTQLNRALTGIAVEQDKNTQEVFAQVKQIYKTPPIKDFGGFNFSQILPDPSKPSKRSFIEDLLFNKVTLADAGFIKQYGDCLGDIAARDLICAQKFNGLTVLPPLLTDEMIAQYTSALLAGTITSGWTFGAGAALQIPFAMQMAYRFNGIGVTQNVLYENQKLIANQFNSAIGKIQDSLSSTASALGKLQDVVNQNAQALNTLVKQLSSNFGAISSVLNDILSRLDPPEAEVQIDRLITGRLQSLQTYVTQQLIRAAEIRASANLAATKMSECVLGQSKRVDFCGKGYHLMSFPQSAPHGVVFLHVTYVPAQEKNFTTAPAICHDGKAHFPREGVFVSNGTHWFVTQRNFYEPQIITTDNTFVSGNCDVVIGIVNNTVYDPLQPELDSFKEELDKYFKNHTSPDVDLGDISGINASVVNIQKEIDRLNEVAKNLNESLIDLQELGKYEQYIKGSGRENLYFQGGGGSGYIPEAPRDGQAYVRKDGEWVLLSTFLGHHHHHHHH

SEQ ID NO: 5600 - protein, 1281 aa, Artificial Sequence
  Description of Artificial Sequence: Synthetic polypeptide
MGILPSPGMPALLSLVSLLSVLLMGCVAETGTQCVNLTTRTQLPPAYTNSFTRGVYYPDKVFRSSVLHSTQDLFLPFFSNVTWFHAIHVSGTNGTKRFDNPVLPFNDGVYFASTEKSNIIRGWIFGTTLDSKTQSLLIVNNATNVVIKVCEFQFCNDPFLGVYYHKNNKSWMESEFRVYSSANNCTFEYVSQPFLMDLEGKQGNFKNLREFVFKNIDGYFKIYSKHTPINLVRDLPQGFSALEPLVDLPIGINITRFQTLLALHRSYLTPGDSSSGWTAGAAAYYVGYLQPRTFLLKYNENGTITDAVDCALDPLSETKCTLKSFTVEKGIYQTSNFRVQPTESIVRFPNITNLCPFGEVFNATRFASVYAWNRKRISNCVADYSVLYNSASFSTFKCYGVSPTKLNDLCFTNVYADSFVIRGDEVRQIAPGQTGKIADYNYKLPDDFTGCVIAWNSNNLDSKVGGNYNYLYRLFRKSNLKPFERDISTEIYQAGSTPCNGVEGFNCYFPLQSYGFQPTNGVGYQPYRVVVLSFELLHAPATVCGPKKSTNLVKNKCVNFNFNGLTGTGVLTESNKKFLPFQQFGRDIADTTDAVRDPQTLEILDITPCSFGGVSVITPGTNTSNQVAVLYQDVNCTEVPVAIHADQLTPTWRVYSTGSNVFQTRAGCLIGAEHVNNSYECDIPIGAGICASYQTQTNSPSGAGSVASQSIIAYTMSLGAENEVAYSNNSIAIPTNFTISVTTEILPVSMTKTSVDCTMYICGDSTECSNLLLQYGSFCTQLNRALTGIAVEQDKNTQEVFAQVKQIYKTPPIKDFGGFNFSQILPDPSKPSKRSFIEDLLFNKVTLADAGFIKQYGDCLGDIAARDLICAQKFNGLTVLPPLLTDEMIAQYTSALLAGTITSGWTFGAGAALQIPFAMQMAYRFNGIGVTQNVLYENQKLIANQFNSAIGKIQDSLSSTASALGKLQDVVNQNAQALNTLVKQLSSNFGAISSVLNDILSRLDPPEAEVQIDRLITGRLQSLQTYVTQQLIRAAEIRASANLAATKMSECVLGQSKRVDFCGKGYHLMSFPQSAPHGVVFLHVTYVPAQEKNFTTAPAICHDGKAHFPREGVFVSNGTHWFVTQRNFYEPQIITTDNTFVSGNCDVVIGIVNNTVYDPLQPELDSFKEELDKYFKNHTSPDVDLGDISGINASVVNIQKEIDRLNEVAKNLNESLIDLQELGKYEQYIKGSGRENLYFQGGGGSGYIPEAPRDGQAYVRKDGEWVLLSTFLGHHHHHHHH

SEQ ID NO: 5601 - protein, 1281 aa, Artificial Sequence
  Description of Artificial Sequence: Synthetic polypeptide
MGILPSPGMPALLSLVSLLSVLLMGCVAETGTQCVNLTTRTQLPPAYTNSFTRGVYYPDKVFRSSVLHSTQDLFLPFFSNVTWFHAIHVSGTNGTKRFDNPVLPFNDGVYFASTEKSNIIRGWIFGTTLDSKTQSLLIVNNATNVVIKVCEFQFCNDPFLGVYYHKNNKSWMESEFRVYSSANNCTFEYVSQPFLMDLEGKQGNFKNLREFVFKNIDGYFKIYSKHTPINLVRDLPQGFSALEPLVDLPIGINITRFQTLLALHRSYLTPGDSSSGWTAGAAAYYVGYLQPRTFLLKYNENGTITDAVDCALDPLSETKCTLKSFTVEKGIYQTSNFRVQPTESIVRFPNITNLCPFGEVFNATRFASVYAWNRKRISNCVADYSVLYNSASFSTFKCYGVSPTKLNDLCFTNVYADSFVIRGDEVRQIAPGQTGKIADYNYKLPDDFTGCVIAWNSNNLDSKVGGNYNYLYRLFRKSNLKPFERDISTEIYQAGSTPQNGVEGFNCYFPLQSYGFQPTNGVGYQPYRVVVLSFELLHAPATVCGPKKSTNLVKNKCVNFNFNGLTGTGVLTESNKKFLPFQQFGRDIADTTDAVRDPQTLEILDITPCSFGGVSVITPGTNTSNQVAVLYQDVNCTEVPVAIHADQLTPTWRVYSTGSNVFQTRAGCLIGAEHVNNSYECDIPIGAGICASYQTQTNSPSGAGSVASQSIIAYTMSLGAENSVAYSNNSIAIPTNFTISVTTEILPVSMTKTSVDCTMYICGDSTECSNLLLQYGSFCTQLNRALTGIAVEQDKNTQEVFAQVKQIYKTPPIKDFGGFNFSQILPDPSKPSKRSFIEDLLFNKVTLADAGFIKQYGDCLGDIAARDLICAQKFNGLTVLPPLLTDEMIAQYTSALLAGTITSGWTFGAGAALQIPFAMQMAYRFNGIGVTQNVLYENQKLIANQFNSAIGKIQDSLSSTASALGKLQDVVNQNAQALNTLVKQLSSNFGAISSVLNDILSRLDPPEAEVQIDRLITGRLQSLQTYVTQQLIRAAEIRASANLAATKMSECVLGQSKRVDFCGKGYHLMSFPQSAPHGVVFLHVTYVPAQEKNFTTAPAICHDGKAHFPREGVFVSNGTHWFVTQRNFYEPQIITTDNTFVSGNCDVVIGIVNNTVYDPLQPELDSFKEELDKYFKNHTSPDVDLGDISGINASVVNIQKEIDRLNEVAKNLNESLIDLQELGKYEQYIKGSGRENLYFQGGGGSGYIPEAPRDGQAYVRKDGEWVLLSTFLGHHHHHHHH

SEQ ID NO: 5602 - protein, 1281 aa, Artificial Sequence
  Description of Artificial Sequence: Synthetic polypeptide
MGILPSPGMPALLSLVSLLSVLLMGCVAETGTQCVNLTTRTQLPPAYTNSFTRGVYYPDKVFRSSVLHSTQDLFLPFFSNVTWFHAIHVSGTNGTKRFDNPVLPFNDGVYFASTEKSNIIRGWIFGTTLDSKTQSLLIVNNATNVVIKVCEFQFCNDPFLGVYYHKNNKSWMESEFRVYSSANNCTFEYVSQPFLMDLEGKQGNFKNLREFVFKNIDGYFKIYSKHTPINLVRDLPQGFSALEPLVDLPIGINITRFQTLLALHRSYLTPGDSSSGWTAGAAAYYVGYLQPRTFLLKYNENGTITDAVDCALDPLSETKCTLKSFTVEKGIYQTSNFRVQPTESIVRFPNITNLCPFGEVFNATRFASVYAWNRKRISNCVADYSVLYNSASFSTFKCYGVSPTKLNDLCFTNVYADSFVIRGDEVRQIAPGQTGKIADYNYKLPDDFTGCVIAWNSNNLDSKVGGNYNYLYRLFRKSNLKPFERDISTQIYQAGSTPCNGVEGFNCYFPLQSYGFQPTNGVGYQPYRVVVLSFELLHAPATVCGPKKSTNLVKNKCVNFNFNGLTGTGVLTESNKKFLPFQQFGRDIADTTDAVRDPQTLEILDITPCSFGGVSVITPGTNTSNQVAVLYQDVNCTEVPVAIHADQLTPTWRVYSTGSNVFQTRAGCLIGAEHVNNSYECDIPIGAGICASYQTQTNSPSGAGSVASQSIIAYTMSLGAENSVAYSNNSIAIPTNFTISVTTEILPVSMTKTSVDCTMYICGDSTECSNLLLQYGSFCTQLNRALTGIAVEQDKNTQEVFAQVKQIYKTPPIKDFGGFNFSQILPDPSKPSKRSFIEDLLFNKVTLADAGFIKQYGDCLGDIAARDLICAQKFNGLTVLPPLLTDEMIAQYTSALLAGTITSGWTFGAGAALQIPFAMQMAYRFNGIGVTQNVLYENQKLIANQFNSAIGKIQDSLSSTASALGKLQDVVNQNAQALNTLVKQLSSNFGAISSVLNDILSRLDPPEAEVQIDRLITGRLQSLQTYVTQQLIRAAEIRASANLAATKMSECVLGQSKRVDFCGKGYHLMSFPQSAPHGVVFLHVTYVPAQEKNFTTAPAICHDGKAHFPREGVFVSNGTHWFVTQRNFYEPQIITTDNTFVSGNCDVVIGIVNNTVYDPLQPELDSFKEELDKYFKNHTSPDVDLGDISGINASVVNIQKEIDRLNEVAKNLNESLIDLQELGKYEQYIKGSGRENLYFQGGGGSGYIPEAPRDGQAYVRKDGEWVLLSTFLGHHHHHHHH

SEQ ID NO: 5603 - protein, 1281 aa, Artificial Sequence
  Description of Artificial Sequence: Synthetic polypeptide
MGILPSPGMPALLSLVSLLSVLLMGCVAETGTQCVNLTTRTQLPPAYTNSFTRGVYYPDKVFRSSVLHSTQDLFLPFFSNVTWFHAIHVSGTNGTKRFDNPVLPFNDGVYFASTEKSNIIRGWIFGTTLDSKTQSLLIVNNATNVVIKVCEFQFCNDPFLGVYYHKNNKSWMESEFRVYSSANNCTFEYVSQPFLMDLEGKQGNFKNLREFVFKNIDGYFKIYSKHTPINLVRDLPQGFSALEPLVDLPIGINITRFQTLLALHRSYLTPGDSSSGWTAGAAAYYVGYLQPRTFLLKYNENGTITDAVDCALDPLSETKCTLKSFTVEKGIYQTSNFRVQPTESIVRFPNITNLCPFGEVFNATRFASVYAWNRKRISNCVADYSVLYLSASFSTFKCYGVSPTKLNDLCFTNVYADSFVIRGDEVRQIAPGQTGKIADYNYKLPDDFTGCVIAWNSNNLDSKVGGNYNYLYRLFRKSNLKPFERDISTEIYQAGSTPCNGVEGFNCYFPLQSYGFQPTNGVGYQPYRVVVLSFELLHAPATVCGPKKSTNLVKNKCVNFNFNGLTGTGVLTESNKKFLPFQQFGRDIADTTDAVRDPQTLEILDITPCSFGGVSVITPGTNTSNQVAVLYQDVNCTEVPVAIHADQLTPTWRVYSTGSNVFQTRAGCLIGAEHVNNSYECDIPIGAGICASYQTQTNSPSGAGSVASQSIIAYTMSLGAENSVAYSNNSIAIPTNFTISVTTEILPVSMTKTSVDCTMYICGDSTECSNLLLQYGSFCTQLNRALTGIAVEQDKNTQEVFAQVKQIYKTPPIKDFGGFNFSQILPDPSKPSKRSFIEDLLFNKVTLADAGFIKQYGDCLGDIAARDLICAQKFNGLTVLPPLLTDEMIAQYTSALLAGTITSGWTFGAGAALQIPFAMQMAYRFNGIGVTQNVLYENQKLIANQFNSAIGKIQDSLSSTASALGKLQDVVNQNAQALNTLVKQLSSNFGAISSVLNDILSRLDPPEAEVQIDRLITGRLQSLQTYVTQQLIRAAEIRASANLAATKMSECVLGQSKRVDFCGKGYHLMSFPQSAPHGVVFLHVTYVPAQEKNFTTAPAICHDGKAHFPREGVFVSNGTHWFVTQRNFYEPQIITTDNTFVSGNCDVVIGIVNNTVYDPLQPELDSFKEELDKYFKNHTSPDVDLGDISGINASVVNIQKEIDRLNEVAKNLNESLIDLQELGKYEQYIKGSGRENLYFQGGGGSGYIPEAPRDGQAYVRKDGEWVLLSTFLGHHHHHHHH

SEQ ID NO: 5604 - protein, 1281 aa, Artificial Sequence
  Description of Artificial Sequence: Synthetic polypeptide
MGILPSPGMPALLSLVSLLSVLLMGCVAETGTQCVNLTTRTQLPPAYTNSFTRGVYYPDKVFRSSVLHSTQDLFLPFFSNVTWFHAIHVSGTNGTKRFDNPVLPFNDGVYFASTEKSNIIRGWIFGTTLDSKTQSLLIVNNATNVVIKVCEFQFCNDPFLGVYYHKNNKSWMESEFRVYSSANNCTFEYVSQPFLMDLEGKQGNFKNLREFVFKNIDGYFKIYSKHTPINLVRDLPQGFSALEPLVDLPIGINITRFQTLLALHRSYLTPGDSSSGWTAGAAAYYVGYLQPRTFLLKYNENGTITDAVDCALDPLSETKCTLKSFTVEKGIYQTSNFRVQPTESIVRFPNITNLCPFGEVFNATRFASVYAWNRKRVSNCVADYSVLYNSASFSTFKCYGVSPTKLNDLCFTNVYADSFVIRGDEVRQIAPGQTGKIADYNYKLPDDFTGCVIAWNSNNLDSKVGGNYNYLYRLFRKSNLKPFERDISTEIYQAGSTPCNGVEGFNCYFPLQSYGFQPTNGVGYQPYRVVVLSFELLHAPATVCGPKKSTNLVKNKCVNFNFNGLTGTGVLTESNKKFLPFQQFGRDIADTTDAVRDPQTLEILDITPCSFGGVSVITPGTNTSNQVAVLYQDVNCTEVPVAIHADQLTPTWRVYSTGSNVFQTRAGCLIGAEHVNNSYECDIPIGAGICASYQTQTNSPSGAGSVASQSIIAYTMSLGAENSVAYSNNSIAIPTNFTISVTTEILPVSMTKTSVDCTMYICGDSTECSNLLLQYGSFCTQLNRALTGIAVEQDKNTQEVFAQVKQIYKTPPIKDFGGFNFSQILPDPSKPSKRSFIEDLLFNKVTLADAGFIKQYGDCLGDIAARDLICAQKFNGLTVLPPLLTDEMIAQYTSALLAGTITSGWTFGAGAALQIPFAMQMAYRFNGIGVTQNVLYENQKLIANQFNSAIGKIQDSLSSTASALGKLQDVVNQNAQALNTLVKQLSSNFGAISSVLNDILSRLDPPEAEVQIDRLITGRLQSLQTYVTQQLIRAAEIRASANLAATKMSECVLGQSKRVDFCGKGYHLMSFPQSAPHGVVFLHVTYVPAQEKNFTTAPAICHDGKAHFPREGVFVSNGTHWFVTQRNFYEPQIITTDNTFVSGNCDVVIGIVNNTVYDPLQPELDSFKEELDKYFKNHTSPDVDLGDISGINASVVNIQKEIDRLNEVAKNLNESLIDLQELGKYEQYIKGSGRENLYFQGGGGSGYIPEAPRDGQAYVRKDGEWVLLSTFLGHHHHHHHH

SEQ ID NO: 5605 - protein, 1281 aa, Artificial Sequence
  Description of Artificial Sequence: Synthetic polypeptide
MGILPSPGMPALLSLVSLLSVLLMGCVAETGTQCVNLTTRTQLPPAYTNSFTRGVYYPDKVFRSSVLHSTQDLFLPFFSNVTWFHAIHVSGTNGTKRFDNPVLPFNDGVYFASTEKSNIIRGWIFGTTLDSKTQSLLIVNNATNVVIKVCEFQFCNDPFLGVYYHKNNKSWMESEFRVYSSANNCTFEYVSQPFLMDLEGKQGNFKNLREFVFKNIDGYFKIYSKHTPINLVRDLPQGFSALEPLVDLPIGINITRFQTLLALHRSYLTPGDSSSGWTAGAAAYYVGYLQPRTFLLKYNENGTITDAVDCALDPLSETKCTLKSFTVEKGIYQTSNFRVQPTESIVRFPNITNLCPFGEVFNATRFASVYAWNRKRISNCVADYSVLYNSASFSTFKCYGVSPTKLNDLCFTNVYADSFVIRGDEVRQIAPGQTGKIADYNYKLPDDFTGCVIAWNSVNLDSKVGGNYNYLYRLFRKSNLKPFERDISTEIYQAGSTPCNGVEGFNCYFPLQSYGFQPTNGVGYQPYRVVVLSFELLHAPATVCGPKKSTNLVKNKCVNFNFNGLTGTGVLTESNKKFLPFQQFGRDIADTTDAVRDPQTLEILDITPCSFGGVSVITPGTNTSNQVAVLYQDVNCTEVPVAIHADQLTPTWRVYSTGSNVFQTRAGCLIGAEHVNNSYECDIPIGAGICASYQTQTNSPSGAGSVASQSIIAYTMSLGAENSVAYSNNSIAIPTNFTISVTTEILPVSMTKTSVDCTMYICGDSTECSNLLLQYGSFCTQLNRALTGIAVEQDKNTQEVFAQVKQIYKTPPIKDFGGFNFSQILPDPSKPSKRSFIEDLLFNKVTLADAGFIKQYGDCLGDIAARDLICAQKFNGLTVLPPLLTDEMIAQYTSALLAGTITSGWTFGAGAALQIPFAMQMAYRFNGIGVTQNVLYENQKLIANQFNSAIGKIQDSLSSTASALGKLQDVVNQNAQALNTLVKQLSSNFGAISSVLNDILSRLDPPEAEVQIDRLITGRLQSLQTYVTQQLIRAAEIRASANLAATKMSECVLGQSKRVDFCGKGYHLMSFPQSAPHGVVFLHVTYVPAQEKNFTTAPAICHDGKAHFPREGVFVSNGTHWFVTQRNFYEPQIITTDNTFVSGNCDVVIGIVNNTVYDPLQPELDSFKEELDKYFKNHTSPDVDLGDISGINASVVNIQKEIDRLNEVAKNLNESLIDLQELGKYEQYIKGSGRENLYFQGGGGSGYIPEAPRDGQAYVRKDGEWVLLSTFLGHHHHHHHH

SEQ ID NO: 5606 - protein, 1281 aa, Artificial Sequence
  Description of Artificial Sequence: Synthetic polypeptide
MGILPSPGMPALLSLVSLLSVLLMGCVAETGTQCVNLTTRTQLPPAYTNSFTRGVYYPDKVFRSSVLHSTQDLFLPFFSNVTWFHAIHVSGTNGTKRFDNPVLPFNDGVYFASTEKSNIIRGWIFGTTLDSKTQSLLIVNNATNVVIKVCEFQFCNDPFLGVYYHKNNKSWMESEFRVYSSANNCTFEYVSQPFLMDLEGKQGNFKNLREFVFKNIDGYFKIYSKHTPINLVRDLPQGFSALEPLVDLPIGINITRFQTLLALHRSYLTPGDSSSGWTAGAAAYYVGYLQPRTFLLKYNENGTITDAVDCALDPLSETKCTLKSFTVEKGIYQTSNFRVQPTESIVRFPNITNLCPFGEVFNATRFASVYAWNRKRISNCVADYSVLYNSASFSTFKCYGVSPTKLNDLCFTNVYADSFVIRGDEVRQIAPGQTGKIADYNYKLPDDFTGCVIAWNSNNLDSKVGGNYNYLYRLFRKSNLKPFERDISTIIYQAGSTPCNGVEGFNCYFPLQSYGFQPTNGVGYQPYRVVVLSFELLHAPATVCGPKKSTNLVKNKCVNFNFNGLTGTGVLTESNKKFLPFQQFGRDIADTTDAVRDPQTLEILDITPCSFGGVSVITPGTNTSNQVAVLYQDVNCTEVPVAIHADQLTPTWRVYSTGSNVFQTRAGCLIGAEHVNNSYECDIPIGAGICASYQTQTNSPSGAGSVASQSIIAYTMSLGAENSVAYSNNSIAIPTNFTISVTTEILPVSMTKTSVDCTMYICGDSTECSNLLLQYGSFCTQLNRALTGIAVEQDKNTQEVFAQVKQIYKTPPIKDFGGFNFSQILPDPSKPSKRSFIEDLLFNKVTLADAGFIKQYGDCLGDIAARDLICAQKFNGLTVLPPLLTDEMIAQYTSALLAGTITSGWTFGAGAALQIPFAMQMAYRFNGIGVTQNVLYENQKLIANQFNSAIGKIQDSLSSTASALGKLQDVVNQNAQALNTLVKQLSSNFGAISSVLNDILSRLDPPEAEVQIDRLITGRLQSLQTYVTQQLIRAAEIRASANLAATKMSECVLGQSKRVDFCGKGYHLMSFPQSAPHGVVFLHVTYVPAQEKNFTTAPAICHDGKAHFPREGVFVSNGTHWFVTQRNFYEPQIITTDNTFVSGNCDVVIGIVNNTVYDPLQPELDSFKEELDKYFKNHTSPDVDLGDISGINASVVNIQKEIDRLNEVAKNLNESLIDLQELGKYEQYIKGSGRENLYFQGGGGSGYIPEAPRDGQAYVRKDGEWVLLSTFLGHHHHHHHH

SEQ ID NO: 5607 - protein, 1281 aa, Artificial Sequence
  Description of Artificial Sequence: Synthetic polypeptide
MGILPSPGMPALLSLVSLLSVLLMGCVAETGTQCVNLTTRTQLPPAYTNSFTRGVYYPDKVFRSSVLHSTQDLFLPFFSNVTWFHAIHVSGTNGTKRFDNPVLPFNDGVYFASTEKSNIIRGWIFGTTLDSKTQSLLIVNNATNVVIKVCEFQFCNDPFLGVYYHKNNKSWMESEFRVYSSANNCTFEYVSQPFLMDLEGKQGNFKNLREFVFKNIDGYFKIYSKHTPINLVRDLPQGFSALEPLVDLPIGINITRFQTLLALHRSYLTPGDSSSGWTAGAAAYYVGYLQPRTFLLKYNENGTITDAVDCALDPLSETKCTLKSFTVEKGIYQTSNFRVQPTESIVRFPNITNLCPFGEVFNATRFASVYAWNRKRISNCVADYSVLYNSASFSTFKCYGVSPTKLNDLCFTNVYADSFVIRGDEVRQIAPGQTGKIADYNYKLPDDFTGCVIAWNSNNLDSKVGGNYNYLYRLFRKSNLKPFERDISTEMYQAGSTPCNGVEGFNCYFPLQSYGFQPTNGVGYQPYRVVVLSFELLHAPATVCGPKKSTNLVKNKCVNFNFNGLTGTGVLTESNKKFLPFQQFGRDIADTTDAVRDPQTLEILDITPCSFGGVSVITPGTNTSNQVAVLYQDVNCTEVPVAIHADQLTPTWRVYSTGSNVFQTRAGCLIGAEHVNNSYECDIPIGAGICASYQTQTNSPSGAGSVASQSIIAYTMSLGAENSVAYSNNSIAIPTNFTISVTTEILPVSMTKTSVDCTMYICGDSTECSNLLLQYGSFCTQLNRALTGIAVEQDKNTQEVFAQVKQIYKTPPIKDFGGFNFSQILPDPSKPSKRSFIEDLLFNKVTLADAGFIKQYGDCLGDIAARDLICAQKFNGLTVLPPLLTDEMIAQYTSALLAGTITSGWTFGAGAALQIPFAMQMAYRFNGIGVTQNVLYENQKLIANQFNSAIGKIQDSLSSTASALGKLQDVVNQNAQALNTLVKQLSSNFGAISSVLNDILSRLDPPEAEVQIDRLITGRLQSLQTYVTQQLIRAAEIRASANLAATKMSECVLGQSKRVDFCGKGYHLMSFPQSAPHGVVFLHVTYVPAQEKNFTTAPAICHDGKAHFPREGVFVSNGTHWFVTQRNFYEPQIITTDNTFVSGNCDVVIGIVNNTVYDPLQPELDSFKEELDKYFKNHTSPDVDLGDISGINASVVNIQKEIDRLNEVAKNLNESLIDLQELGKYEQYIKGSGRENLYFQGGGGSGYIPEAPRDGQAYVRKDGEWVLLSTFLGHHHHHHHH

SEQ ID NO: 5608 - protein, 1281 aa, Artificial Sequence
  Description of Artificial Sequence: Synthetic polypeptide
MGILPSPGMPALLSLVSLLSVLLMGCVAETGTQCVNLTTRTQLPPAYTNSFTRGVYYPDKVFRSSVLHSTQDLFLPFFSNVTWFHAIHVSGTNGTKRFDNPVLPFNDGVYFASTEKSNIIRGWIFGTTLDSKTQSLLIVNNATNVVIKVCEFQFCNDPFLGVYYHKNNKSWMESEFRVYSSANNCTFEYVSQPFLMDLEGKQGNFKNLREFVFKNIDGYFKIYSKHTPINLVRDLPQGFSALEPLVDLPIGINITRFQTLLALHRSYLTPGDSSSGWTAGAAAYYVGYLQPRTFLLKYNENGTITDAVDCALDPLSETKCTLKSFTVEKGIYQTSNFRVQPTESIVRFPNITNLCPFGEVFNATRFASVYAWNRKRISNCVADYSVLYNSESFSTFKCYGVSPTKLNDLCFTNVYADSFVIRGDEVRQIAPGQTGKIADYNYKLPDDFTGCVIAWNSNNLDSKVGGNYNYLYRLFRKSNLKPFERDISTEIYQAGSTPCNGVEGFNCYFPLQSYGFQPTNGVGYQPYRVVVLSFELLHAPATVCGPKKSTNLVKNKCVNFNFNGLTGTGVLTESNKKFLPFQQFGRDIADTTDAVRDPQTLEILDITPCSFGGVSVITPGTNTSNQVAVLYQDVNCTEVPVAIHADQLTPTWRVYSTGSNVFQTRAGCLIGAEHVNNSYECDIPIGAGICASYQTQTNSPSGAGSVASQSIIAYTMSLGAENSVAYSNNSIAIPTNFTISVTTEILPVSMTKTSVDCTMYICGDSTECSNLLLQYGSFCTQLNRALTGIAVEQDKNTQEVFAQVKQIYKTPPIKDFGGFNFSQILPDPSKPSKRSFIEDLLFNKVTLADAGFIKQYGDCLGDIAARDLICAQKFNGLTVLPPLLTDEMIAQYTSALLAGTITSGWTFGAGAALQIPFAMQMAYRFNGIGVTQNVLYENQKLIANQFNSAIGKIQDSLSSTASALGKLQDVVNQNAQALNTLVKQLSSNFGAISSVLNDILSRLDPPEAEVQIDRLITGRLQSLQTYVTQQLIRAAEIRASANLAATKMSECVLGQSKRVDFCGKGYHLMSFPQSAPHGVVFLHVTYVPAQEKNFTTAPAICHDGKAHFPREGVFVSNGTHWFVTQRNFYEPQIITTDNTFVSGNCDVVIGIVNNTVYDPLQPELDSFKEELDKYFKNHTSPDVDLGDISGINASVVNIQKEIDRLNEVAKNLNESLIDLQELGKYEQYIKGSGRENLYFQGGGGSGYIPEAPRDGQAYVRKDGEWVLLSTFLGHHHHHHHH

SEQ ID NO: 5609 - protein, 1281 aa, Artificial Sequence
  Description of Artificial Sequence: Synthetic polypeptide
MGILPSPGMPALLSLVSLLSVLLMGCVAETGTQCVNLTTRTQLPPAYTNSFTRGVYYPDKVFRSSVLHSTQDLFLPFFSNVTWFHAIHVSGTNGTKRFDNPVLPFNDGVYFASTEKSNIIRGWIFGTTLDSKTQSLLIVNNATNVVIKVCEFQFCNDPFLGVYYHKNNKSWMESEFRVYSSANNCTFEYVSQPFLMDLEGKQGNFKNLREFVFKNIDGYFKIYSKHTPINLVRDLPQGFSALEPLVDLPIGINITRFQTLLALHRSYLTPGDSSSGWTAGAAAYYVGYLQPRTFLLKYNENGTITDAVDCALDPLSETKCTLKSFTVEKGIYQTSNFRVQPTESIVRFPNITNLCPFGEVFNATRFASVYAWNRKRISNCVADYSVLYNSASFSTFKCYGVSPTKLNDLCFTNVYADSFVIRGDEVRQIAPGQTGKIADYNYKLPDDFTGCVIAWNSNNLDSKVGGNYNYLYRLFRKSNLKPFERDISTENYQAGSTPCNGVEGFNCYFPLQSYGFQPTNGVGYQPYRVVVLSFELLHAPATVCGPKKSTNLVKNKCVNFNFNGLTGTGVLTESNKKFLPFQQFGRDIADTTDAVRDPQTLEILDITPCSFGGVSVITPGTNTSNQVAVLYQDVNCTEVPVAIHADQLTPTWRVYSTGSNVFQTRAGCLIGAEHVNNSYECDIPIGAGICASYQTQTNSPSGAGSVASQSIIAYTMSLGAENSVAYSNNSIAIPTNFTISVTTEILPVSMTKTSVDCTMYICGDSTECSNLLLQYGSFCTQLNRALTGIAVEQDKNTQEVFAQVKQIYKTPPIKDFGGFNFSQILPDPSKPSKRSFIEDLLFNKVTLADAGFIKQYGDCLGDIAARDLICAQKFNGLTVLPPLLTDEMIAQYTSALLAGTITSGWTFGAGAALQIPFAMQMAYRFNGIGVTQNVLYENQKLIANQFNSAIGKIQDSLSSTASALGKLQDVVNQNAQALNTLVKQLSSNFGAISSVLNDILSRLDPPEAEVQIDRLITGRLQSLQTYVTQQLIRAAEIRASANLAATKMSECVLGQSKRVDFCGKGYHLMSFPQSAPHGVVFLHVTYVPAQEKNFTTAPAICHDGKAHFPREGVFVSNGTHWFVTQRNFYEPQIITTDNTFVSGNCDVVIGIVNNTVYDPLQPELDSFKEELDKYFKNHTSPDVDLGDISGINASVVNIQKEIDRLNEVAKNLNESLIDLQELGKYEQYIKGSGRENLYFQGGGGSGYIPEAPRDGQAYVRKDGEWVLLSTFLGHHHHHHHH

SEQ ID NO: 5610 - protein, 1281 aa, Artificial Sequence
  Description of Artificial Sequence: Synthetic polypeptide
MGILPSPGMPALLSLVSLLSVLLMGCVAETGTQCVNLTTRTQLPPAYTNSFTRGVYYPDKVFRSSVLHSTQDLFLPFFSNVTWFHAIHVSGTNGTKRFDNPVLPFNDGVYFASTEKSNIIRGWIFGTTLDSKTQSLLIVNNATNVVIKVCEFQFCNDPFLGVYYHKNNKSWMESEFRVYSSANNCTFEYVSQPFLMDLEGKQGNFKNLREFVFKNIDGYFKIYSKHTPINLVRDLPQGFSALEPLVDLPIGINITRFQTLLALHRSYLTPGDSSSGWTAGAAAYYVGYLQPRTFLLKYNENGTITDAVDCALDPLSETKCTLKSFTVEKGIYQTSNFRVQPTESIVRFPNITNLCPFGEVFNATRFASVYAWNRKRISNCVADYSVLYNSASFSTFKCYGVSPTKLNDLCFTNVYADSFVIRGDEVRQIAPGQTGKIADYNYKLPDDFTGCVIAWNSNNLDSKVGGNYNYLYRLFRKSNLRPFERDISTEIYQAGSTPCNGVEGFNCYFPLQSYGFQPTNGVGYQPYRVVVLSFELLHAPATVCGPKKSTNLVKNKCVNFNFNGLTGTGVLTESNKKFLPFQQFGRDIADTTDAVRDPQTLEILDITPCSFGGVSVITPGTNTSNQVAVLYQDVNCTEVPVAIHADQLTPTWRVYSTGSNVFQTRAGCLIGAEHVNNSYECDIPIGAGICASYQTQTNSPSGAGSVASQSIIAYTMSLGAENSVAYSNNSIAIPTNFTISVTTEILPVSMTKTSVDCTMYICGDSTECSNLLLQYGSFCTQLNRALTGIAVEQDKNTQEVFAQVKQIYKTPPIKDFGGFNFSQILPDPSKPSKRSFIEDLLFNKVTLADAGFIKQYGDCLGDIAARDLICAQKFNGLTVLPPLLTDEMIAQYTSALLAGTITSGWTFGAGAALQIPFAMQMAYRFNGIGVTQNVLYENQKLIANQFNSAIGKIQDSLSSTASALGKLQDVVNQNAQALNTLVKQLSSNFGAISSVLNDILSRLDPPEAEVQIDRLITGRLQSLQTYVTQQLIRAAEIRASANLAATKMSECVLGQSKRVDFCGKGYHLMSFPQSAPHGVVFLHVTYVPAQEKNFTTAPAICHDGKAHFPREGVFVSNGTHWFVTQRNFYEPQIITTDNTFVSGNCDVVIGIVNNTVYDPLQPELDSFKEELDKYFKNHTSPDVDLGDISGINASVVNIQKEIDRLNEVAKNLNESLIDLQELGKYEQYIKGSGRENLYFQGGGGSGYIPEAPRDGQAYVRKDGEWVLLSTFLGHHHHHHHH

SEQ ID NO: 5611 - protein, 1281 aa, Artificial Sequence
  Description of Artificial Sequence: Synthetic polypeptide
MGILPSPGMPALLSLVSLLSVLLMGCVAETGTQCVNLTTRTQLPPAYTNSFTRGVYYPDKVFRSSVLHSTQDLFLPFFSNVTWFHAIHVSGTNGTKRFDNPVLPFNDGVYFASTEKSNIIRGWIFGTTLDSKTQSLLIVNNATNVVIKVCEFQFCNDPFLGVYYHKNNKSWMESEFRVYSSANNCTFEYVSQPFLMDLEGKQGNFKNLREFVFKNIDGYFKIYSKHTPINLVRDLPQGFSALEPLVDLPIGINITRFQTLLALHRSYLTPGDSSSGWTAGAAAYYVGYLQPRTFLLKYNENGTITDAVDCALDPLSETKCTLKSFTVEKGIYQTSNFRVQPTESIVRFPNITNLCPFGEVFNATRFASVYAWNRKRISNCVADYSVLYNSASFSTFKCYGVSPTKLNDLCFTNVYADSFVIRGDEVRQIAPGQTGKIADYNYKLPDDFTGCVIAWNSNNLDSKVGGNYNYLYRLFRKSNLKPFERDIETEIYQAGSTPCNGVEGFNCYFPLQSYGFQPTNGVGYQPYRVVVLSFELLHAPATVCGPKKSTNLVKNKCVNFNFNGLTGTGVLTESNKKFLPFQQFGRDIADTTDAVRDPQTLEILDITPCSFGGVSVITPGTNTSNQVAVLYQDVNCTEVPVAIHADQLTPTWRVYSTGSNVFQTRAGCLIGAEHVNNSYECDIPIGAGICASYQTQTNSPSGAGSVASQSIIAYTMSLGAENSVAYSNNSIAIPTNFTISVTTEILPVSMTKTSVDCTMYICGDSTECSNLLLQYGSFCTQLNRALTGIAVEQDKNTQEVFAQVKQIYKTPPIKDFGGFNFSQILPDPSKPSKRSFIEDLLFNKVTLADAGFIKQYGDCLGDIAARDLICAQKFNGLTVLPPLLTDEMIAQYTSALLAGTITSGWTFGAGAALQIPFAMQMAYRFNGIGVTQNVLYENQKLIANQFNSAIGKIQDSLSSTASALGKLQDVVNQNAQALNTLVKQLSSNFGAISSVLNDILSRLDPPEAEVQIDRLITGRLQSLQTYVTQQLIRAAEIRASANLAATKMSECVLGQSKRVDFCGKGYHLMSFPQSAPHGVVFLHVTYVPAQEKNFTTAPAICHDGKAHFPREGVFVSNGTHWFVTQRNFYEPQIITTDNTFVSGNCDVVIGIVNNTVYDPLQPELDSFKEELDKYFKNHTSPDVDLGDISGINASVVNIQKEIDRLNEVAKNLNESLIDLQELGKYEQYIKGSGRENLYFQGGGGSGYIPEAPRDGQAYVRKDGEWVLLSTFLGHHHHHHHH

SEQ ID NO: 5612 - protein, 1281 aa, Artificial Sequence
  Description of Artificial Sequence: Synthetic polypeptide
MGILPSPGMPALLSLVSLLSVLLMGCVAETGTQCVNLTTRTQLPPAYTNSFTRGVYYPDKVFRSSVLHSTQDLFLPFFSNVTWFHAIHVSGTNGTKRFDNPVLPFNDGVYFASTEKSNIIRGWIFGTTLDSKTQSLLIVNNATNVVIKVCEFQFCNDPFLGVYYHKNNKSWMESEFRVYSSANNCTFEYVSQPFLMDLEGKQGNFKNLREFVFKNIDGYFKIYSKHTPINLVRDLPQGFSALEPLVDLPIGINITRFQTLLALHRSYLTPGDSSSGWTAGAAAYYVGYLQPRTFLLKYNENGTITDAVDCALDPLSETKCTLKSFTVEKGIYQTSNFRVQPTESIVRFPNITNLCPFGEVFNATRFASVYAWNRKRISNCVADYSVLYNSASFSTFKCYGVSPTKLNDLCFTNVYADSFVIRGDEVRQIAPGQTGKIADYNYKLPDDFTGCVIAWNSNNLDSKVGGNYNYLYRLFRKSNLKPFERDISTEIYQAGSTPCNGVEGFNCYFPLQSYGFQPTNGVGYQPYRVVVLSFELNHAPATVCGPKKSTNLVKNKCVNFNFNGLTGTGVLTESNKKFLPFQQFGRDIADTTDAVRDPQTLEILDITPCSFGGVSVITPGTNTSNQVAVLYQDVNCTEVPVAIHADQLTPTWRVYSTGSNVFQTRAGCLIGAEHVNNSYECDIPIGAGICASYQTQTNSPSGAGSVASQSIIAYTMSLGAENSVAYSNNSIAIPTNFTISVTTEILPVSMTKTSVDCTMYICGDSTECSNLLLQYGSFCTQLNRALTGIAVEQDKNTQEVFAQVKQIYKTPPIKDFGGFNFSQILPDPSKPSKRSFIEDLLFNKVTLADAGFIKQYGDCLGDIAARDLICAQKFNGLTVLPPLLTDEMIAQYTSALLAGTITSGWTFGAGAALQIPFAMQMAYRFNGIGVTQNVLYENQKLIANQFNSAIGKIQDSLSSTASALGKLQDVVNQNAQALNTLVKQLSSNFGAISSVLNDILSRLDPPEAEVQIDRLITGRLQSLQTYVTQQLIRAAEIRASANLAATKMSECVLGQSKRVDFCGKGYHLMSFPQSAPHGVVFLHVTYVPAQEKNFTTAPAICHDGKAHFPREGVFVSNGTHWFVTQRNFYEPQIITTDNTFVSGNCDVVIGIVNNTVYDPLQPELDSFKEELDKYFKNHTSPDVDLGDISGINASVVNIQKEIDRLNEVAKNLNESLIDLQELGKYEQYIKGSGRENLYFQGGGGSGYIPEAPRDGQAYVRKDGEWVLLSTFLGHHHHHHHH

SEQ ID NO: 5613 - protein, 1281 aa, Artificial Sequence
  Description of Artificial Sequence: Synthetic polypeptide
MGILPSPGMPALLSLVSLLSVLLMGCVAETGTQCVNLTTRTQLPPAYTNSFTRGVYYPDKVFRSSVLHSTQDLFLPFFSNVTWFHAIHVSGTNGTKRFDNPVLPFNDGVYFASTEKSNIIRGWIFGTTLDSKTQSLLIVNNATNVVIKVCEFQFCNDPFLGVYYHKNNKSWMESEFRVYSSANNCTFEYVSQPFLMDLEGKQGNFKNLREFVFKNIDGYFKIYSKHTPINLVRDLPQGFSALEPLVDLPIGINITRFQTLLALHRSYLTPGDSSSGWTAGAAAYYVGYLQPRTFLLKYNENGTITDAVDCALDPLSETKCTLKSFTVEKGIYQTSNFRVQPTESIVRFPNITNLCPFGEVFNATRFASVYAWNRKRISNCVADYSVLYNSASFSTFKCYGVSPTKLNDLCFTNVYADSFVIRGDEVRQIAPGQTGKIADYNYKLPDDFTGCVIAWNSNNLDSKDGGNYNYLYRLFRKSNLKPFERDISTEIYQAGSTPCNGVEGFNCYFPLQSYGFQPTNGVGYQPYRVVVLSFELLHAPATVCGPKKSTNLVKNKCVNFNFNGLTGTGVLTESNKKFLPFQQFGRDIADTTDAVRDPQTLEILDITPCSFGGVSVITPGTNTSNQVAVLYQDVNCTEVPVAIHADQLTPTWRVYSTGSNVFQTRAGCLIGAEHVNNSYECDIPIGAGICASYQTQTNSPSGAGSVASQSIIAYTMSLGAENSVAYSNNSIAIPTNFTISVTTEILPVSMTKTSVDCTMYICGDSTECSNLLLQYGSFCTQLNRALTGIAVEQDKNTQEVFAQVKQIYKTPPIKDFGGFNFSQILPDPSKPSKRSFIEDLLFNKVTLADAGFIKQYGDCLGDIAARDLICAQKFNGLTVLPPLLTDEMIAQYTSALLAGTITSGWTFGAGAALQIPFAMQMAYRFNGIGVTQNVLYENQKLIANQFNSAIGKIQDSLSSTASALGKLQDVVNQNAQALNTLVKQLSSNFGAISSVLNDILSRLDPPEAEVQIDRLITGRLQSLQTYVTQQLIRAAEIRASANLAATKMSECVLGQSKRVDFCGKGYHLMSFPQSAPHGVVFLHVTYVPAQEKNFTTAPAICHDGKAHFPREGVFVSNGTHWFVTQRNFYEPQIITTDNTFVSGNCDVVIGIVNNTVYDPLQPELDSFKEELDKYFKNHTSPDVDLGDISGINASVVNIQKEIDRLNEVAKNLNESLIDLQELGKYEQYIKGSGRENLYFQGGGGSGYIPEAPRDGQAYVRKDGEWVLLSTFLGHHHHHHHH

SEQ ID NO: 5614 - protein, 1281 aa, Artificial Sequence
  Description of Artificial Sequence: Synthetic polypeptide
MGILPSPGMPALLSLVSLLSVLLMGCVAETGTQCVNLTTRTQLPPAYTNSFTRGVYYPDKVFRSSVLHSTQDLFLPFFSNVTWFHAIHVSGTNGTKRFDNPVLPFNDGVYFASTEKSNIIRGWIFGTTLDSKTQSLLIVNNATNVVIKVCEFQFCNDPFLGVYYHKNNKSWMESEFRVYSSANNCTFEYVSQPFLMDLEGKQGNFKNLREFVFKNIDGYFKIYSKHTPINLVRDLPQGFSALEPLVDLPIGINITRFQTLLALHRSYLTPGDSSSGWTAGAAAYYVGYLQPRTFLLKYNENGTITDAVDCALDPLSETKCTLKSFTVEKGIYQTSNFRVQPTESIVRFPNITNLCPFGEVFNATRFASVYAWNRKRISNCVADYSVLYNSASFSTFKCYGVSPTKLNDLCFTNVYADSFVIRGDEVRQIAPGQTGKIADYNYKLPDDFTGCVIAWNSNNLDSKVGGNYNYLYRLFRKSNLKPFERDISTEKYQAGSTPCNGVEGFNCYFPLQSYGFQPTNGVGYQPYRVVVLSFELLHAPATVCGPKKSTNLVKNKCVNFNFNGLTGTGVLTESNKKFLPFQQFGRDIADTTDAVRDPQTLEILDITPCSFGGVSVITPGTNTSNQVAVLYQDVNCTEVPVAIHADQLTPTWRVYSTGSNVFQTRAGCLIGAEHVNNSYECDIPIGAGICASYQTQTNSPSGAGSVASQSIIAYTMSLGAENSVAYSNNSIAIPTNFTISVTTEILPVSMTKTSVDCTMYICGDSTECSNLLLQYGSFCTQLNRALTGIAVEQDKNTQEVFAQVKQIYKTPPIKDFGGFNFSQILPDPSKPSKRSFIEDLLFNKVTLADAGFIKQYGDCLGDIAARDLICAQKFNGLTVLPPLLTDEMIAQYTSALLAGTITSGWTFGAGAALQIPFAMQMAYRFNGIGVTQNVLYENQKLIANQFNSAIGKIQDSLSSTASALGKLQDVVNQNAQALNTLVKQLSSNFGAISSVLNDILSRLDPPEAEVQIDRLITGRLQSLQTYVTQQLIRAAEIRASANLAATKMSECVLGQSKRVDFCGKGYHLMSFPQSAPHGVVFLHVTYVPAQEKNFTTAPAICHDGKAHFPREGVFVSNGTHWFVTQRNFYEPQIITTDNTFVSGNCDVVIGIVNNTVYDPLQPELDSFKEELDKYFKNHTSPDVDLGDISGINASVVNIQKEIDRLNEVAKNLNESLIDLQELGKYEQYIKGSGRENLYFQGGGGSGYIPEAPRDGQAYVRKDGEWVLLSTFLGHHHHHHHH

SEQ ID NO: 5615 - protein, 1281 aa, Artificial Sequence
  Description of Artificial Sequence: Synthetic polypeptide
MGILPSPGMPALLSLVSLLSVLLMGCVAETGTQCVNLTTRTQLPPAYTNSFTRGVYYPDKVFRSSVLHSTQDLFLPFFSNVTWFHAIHVSGTNGTKRFDNPVLPFNDGVYFASTEKSNIIRGWIFGTTLDSKTMSLLIVNNATNVVIKVCEFQFCNDPFLGVYYHKNNKSWMESEFRVYSSANNCTFEYVSQPFLMDLEGKQGNFKNLREFVFKNIDGYFKIYSKHTPINLVRDLPQGFSALEPLVDLPIGINITRFQTLLALHRSYLTPGDSSSGWTAGAAAYYVGYLQPRTFLLKYNENGTITDAVDCALDPLSETKCTLKSFTVEKGIYQTSNFRVQPTESIVRFPNITNLCPFGEVFNATRFASVYAWNRKRISNCVADYSVLYNSASFSTFKCYGVSPTKLNDLCFTNVYADSFVIRGDEVRQIAPGQTGKIADYNYKLPDDFTGCVIAWNSNNLDSKVGGNYNYLYRLFRKSNLKPFERDISTEIYQAGSTPCNGVEGFNCYFPLQSYGFQPTNGVGYQPYRVVVLSFELLHAPATVCGPKKSTNLVKNKCVNFNFNGLTGTGVLTESNKKFLPFQQFGRDIADTTDAVRDPQTLEILDITPCSFGGVSVITPGTNTSNQVAVLYQDVNCTEVPVAIHADQLTPTWRVYSTGSNVFQTRAGCLIGAEHVNNSYECDIPIGAGICASYQTQTNSPSGAGSVASQSIIAYTMSLGAENSVAYSNNSIAIPTNFTISVTTEILPVSMTKTSVDCTMYICGDSTECSNLLLQYGSFCTQLNRALTGIAVEQDKNTQEVFAQVKQIYKTPPIKDFGGFNFSQILPDPSKPSKRSFIEDLLFNKVTLADAGFIKQYGDCLGDIAARDLICAQKFNGLTVLPPLLTDEMIAQYTSALLAGTITSGWTFGAGAALQIPFAMQMAYRFNGIGVTQNVLYENQKLIANQFNSAIGKIQDSLSSTASALGKLQDVVNQNAQALNTLVKQLSSNFGAISSVLNDILSRLDPPEAEVQIDRLITGRLQSLQTYVTQQLIRAAEIRASANLAATKMSECVLGQSKRVDFCGKGYHLMSFPQSAPHGVVFLHVTYVPAQEKNFTTAPAICHDGKAHFPREGVFVSNGTHWFVTQRNFYEPQIITTDNTFVSGNCDVVIGIVNNTVYDPLQPELDSFKEELDKYFKNHTSPDVDLGDISGINASVVNIQKEIDRLNEVAKNLNESLIDLQELGKYEQYIKGSGRENLYFQGGGGSGYIPEAPRDGQAYVRKDGEWVLLSTFLGHHHHHHHH

SEQ ID NO: 5616 - protein, 1281 aa, Artificial Sequence
  Description of Artificial Sequence: Synthetic polypeptide
MGILPSPGMPALLSLVSLLSVLLMGCVAETGTQCVNLTTRTQLPPAYTNSFTRGVYYPDKVFRSSVLHSTQDLFLPFFSNVTWFHAIHVSGTNGTKRFDNPVLPFNDGVYFASTEKSNIIRGWIFGTTLDSKTQSLLIVNNATNVVIKVCEFQFCNDPFLGVYYHKNNKSWMESEFRVYSSANNCTFEYVSQPFLMDLEGKQGNFKNLREFVFKNIDGYFKIYSKHTPINLVRDLPQGFSALEPLVDLPIGINITRFQTLLALHRSYLTPGDSSSGWTAGAAAYYVGYLQPRTFLLKYNENGTITDAVDCALDPLSETKCTLKSFTVEKGIYQTSNFRVQPTESIVRFPNITNLCPFGEVFNATRFASVYAWNRKRISNCVADYSVLYNSASFSTFKCYGVSPTKLNDLCFTNVYADSFVIRGDEVRQIAPGQTGKIADYNYKLPDDFTGCVIAWNSNNLDSKVGGNYNYLYRLFRKSNFKPFERDISTEIYQAGSTPCNGVEGFNCYFPLQSYGFQPTNGVGYQPYRVVVLSFELLHAPATVCGPKKSTNLVKNKCVNFNFNGLTGTGVLTESNKKFLPFQQFGRDIADTTDAVRDPQTLEILDITPCSFGGVSVITPGTNTSNQVAVLYQDVNCTEVPVAIHADQLTPTWRVYSTGSNVFQTRAGCLIGAEHVNNSYECDIPIGAGICASYQTQTNSPSGAGSVASQSIIAYTMSLGAENSVAYSNNSIAIPTNFTISVTTEILPVSMTKTSVDCTMYICGDSTECSNLLLQYGSFCTQLNRALTGIAVEQDKNTQEVFAQVKQIYKTPPIKDFGGFNFSQILPDPSKPSKRSFIEDLLFNKVTLADAGFIKQYGDCLGDIAARDLICAQKFNGLTVLPPLLTDEMIAQYTSALLAGTITSGWTFGAGAALQIPFAMQMAYRFNGIGVTQNVLYENQKLIANQFNSAIGKIQDSLSSTASALGKLQDVVNQNAQALNTLVKQLSSNFGAISSVLNDILSRLDPPEAEVQIDRLITGRLQSLQTYVTQQLIRAAEIRASANLAATKMSECVLGQSKRVDFCGKGYHLMSFPQSAPHGVVFLHVTYVPAQEKNFTTAPAICHDGKAHFPREGVFVSNGTHWFVTQRNFYEPQIITTDNTFVSGNCDVVIGIVNNTVYDPLQPELDSFKEELDKYFKNHTSPDVDLGDISGINASVVNIQKEIDRLNEVAKNLNESLIDLQELGKYEQYIKGSGRENLYFQGGGGSGYIPEAPRDGQAYVRKDGEWVLLSTFLGHHHHHHHH

SEQ ID NO: 5617 - protein, 1281 aa, Artificial Sequence
  Description of Artificial Sequence: Synthetic polypeptide
MGILPSPGMPALLSLVSLLSVLLMGCVAETGTQCVNLTTRTQLPPAYTNSFTRGVYYPDKVFRSSVLHSTQDLFLPFFSNVTWFHAIHVSGTNGTKRFDNPVLPFNDGVYFASTEKSNIIRGWIFGTTLDSKTQSLLIVNNATNVVIKVCEFQFCNDPFLGVYYHKNNKSWMESEFRVYSSANNCTFEYVSQPFLMDLEGKQGNFKNLREFVFKNIDGYFKIYSKHTPINLVRDLPQGFSALEPLVDLPIGINITRFQTLLALHRSYLTPGDSSSGWTAGAAAYYVGYLQPRTFLLKYNENGTITDAVDCALDPLSETKCTLKSFTVEKGIYQTSNFRVQPTESIVRFPNITNLCPFGEVFNATRFASVYAWNRKRISNCVADYSVLYNSASFSTFKCYGVSPTKLNDLCFTNVYADSFVIRGDEVRQIAPGQTGKIADYNYKLPDDFTGCVIAWNSNNLDSKVGGNYNYLYRLFRKSNLKPFERDISTEIYQAGSTPCNGVEGFNCYFPLQSYGFQPTNGVGYQPYRVVVLSFELLHAPATVCGPKKSTNLVKNKCVNFNFNGLTGTGVLTESNKKFLPFQQFGRDIADTTDAVRDPQTLEILDITPCSFGGVSVITPGTNTSNQVAVLYQDVNCTEVPVAIHADQLTPTWRVYSTGSNVFQTRAGCLIGAEHVNNSYECDIPIGAGICASYQTQTNSPSGAGSVASQSIIAYTMSLGAENSVAYSNNSIAIPTNFTISVTTEILPVSMTKTSVDCTMYICGDSTECSNLLLQYGSFCTQLNRALTGIAVEQDKNTQEVFAQVKQIYKTPPIKDFGGFNFSQILPDPSKPSKRSFIEDLLFNKVTLADAGFIKQYGDCLGDIAARDLICAQKFNGLTVLPPLLTDEMIAQYTSALLAGTITSGWTFGRGAALQIPFAMQMAYRFNGIGVTQNVLYENQKLIANQFNSAIGKIQDSLSSTASALGKLQDVVNQNAQALNTLVKQLSSNFGAISSVLNDILSRLDPPEAEVQIDRLITGRLQSLQTYVTQQLIRAAEIRASANLAATKMSECVLGQSKRVDFCGKGYHLMSFPQSAPHGVVFLHVTYVPAQEKNFTTAPAICHDGKAHFPREGVFVSNGTHWFVTQRNFYEPQIITTDNTFVSGNCDVVIGIVNNTVYDPLQPELDSFKEELDKYFKNHTSPDVDLGDISGINASVVNIQKEIDRLNEVAKNLNESLIDLQELGKYEQYIKGSGRENLYFQGGGGSGYIPEAPRDGQAYVRKDGEWVLLSTFLGHHHHHHHH

SEQ ID NO: 5618 - protein, 1281 aa, Artificial Sequence
  Description of Artificial Sequence: Synthetic polypeptide
MGILPSPGMPALLSLVSLLSVLLMGCVAETGTQCVNLTTRTQLPPAYTNSFTRGVYYPDKVFRSSVLHSTQDLFLPFFSNVTWFHAIHVSGTNGTKRFDNPVLPFNDGVYFASTEKSNIIRGWIFGTTLDSKTQSLLIVNNATNVVIKVCEFQFCNDPFLGVYYHKNNKSWMESEFRVYSSANNCTFEYVSQPFLMDLEGKQGNFKNLREFVFKNIDGYFKIYSKHTPINLVRDLPQGFSALEPLVDLPIGINITRFQTLLALHRSYLTPGDSSSGWTAGAAAYYVGYLQPRTFLLKYNENGTITDAVDCALDPLSETKCTLKSFTVEKGIYQTSNFRVQPTESIVRFPNITNLCPFGEVFNATRFASVYAWNRKRISNCVADYSVLYNSASFSTFKCYGVSPTKLNDLCFTNVYADSFVIRGDEVRQIAPGQTGKIADYNYKLPDDFTGCVIAWNSNNLDSKVGGNYNYLYRLFRKSNLKPFERDISTEIYQAGSTPCNGVEGFNCYFPLQSYGFQPTNGVGYQPYRVVVLSFELQHAPATVCGPKKSTNLVKNKCVNFNFNGLTGTGVLTESNKKFLPFQQFGRDIADTTDAVRDPQTLEILDITPCSFGGVSVITPGTNTSNQVAVLYQDVNCTEVPVAIHADQLTPTWRVYSTGSNVFQTRAGCLIGAEHVNNSYECDIPIGAGICASYQTQTNSPSGAGSVASQSIIAYTMSLGAENSVAYSNNSIAIPTNFTISVTTEILPVSMTKTSVDCTMYICGDSTECSNLLLQYGSFCTQLNRALTGIAVEQDKNTQEVFAQVKQIYKTPPIKDFGGFNFSQILPDPSKPSKRSFIEDLLFNKVTLADAGFIKQYGDCLGDIAARDLICAQKFNGLTVLPPLLTDEMIAQYTSALLAGTITSGWTFGAGAALQIPFAMQMAYRFNGIGVTQNVLYENQKLIANQFNSAIGKIQDSLSSTASALGKLQDVVNQNAQALNTLVKQLSSNFGAISSVLNDILSRLDPPEAEVQIDRLITGRLQSLQTYVTQQLIRAAEIRASANLAATKMSECVLGQSKRVDFCGKGYHLMSFPQSAPHGVVFLHVTYVPAQEKNFTTAPAICHDGKAHFPREGVFVSNGTHWFVTQRNFYEPQIITTDNTFVSGNCDVVIGIVNNTVYDPLQPELDSFKEELDKYFKNHTSPDVDLGDISGINASVVNIQKEIDRLNEVAKNLNESLIDLQELGKYEQYIKGSGRENLYFQGGGGSGYIPEAPRDGQAYVRKDGEWVLLSTFLGHHHHHHHH

SEQ ID NO: 5619 - protein, 1281 aa, Artificial Sequence
  Description of Artificial Sequence: Synthetic polypeptide
MGILPSPGMPALLSLVSLLSVLLMGCVAETGTQCVNLTTRTQLPPAYTNSFTRGVYYPDKVFRSSVLHSTQDLFLPFFSNVTWFHAIHVSGTNGTKRFDNPVLPFNDGVYFASTEKSNIIRGWIFGTTLDSKTQSLLIVNNATNVVIKVCEFQFCNDPFLGVYYHKNNKSWMESEFRVYSSANNCTFEYVSQPFLMDLEGKQGNFKNLREFVFKNIDGYFKIYSKHTPINLVRDLPQGFSALEPLVDLPIGINITRFQTLLALHRSYLTPGDSSSGWTAGAAAYYVGYLQPRTFLLKYNENGTITDAVDCALDPLSETKCTLKSFTVEKGIYQTSNFRVQPTESIVRFPNITNLCPFGEVFNATRFASVYAWNRKRISNCVADYSVLYNSASFSTFKCYGVSPTKLNDLCFTNVYADSFVIRGDEVRQIAPGQTGKIADYNYKLPDDFTGCVIAWNSNNLDSKVGGNYNYLYRLFRKSNLKPFERDISTEIYQAGSTPCNGVEGFNCYFPLQSYGFQPTNGVGYQPYRVVVLSFELLHAPATVCGPKKSTNLVKNKCVNFNFNGLTGTGVLTESNKKFLPFQQFGRDIADTTDAVRDPQTLEILDITPCSFGGVSVITPGTNTSNQVAVLYQDVNCTEVPVAIHADQLTPTWRVYSTGSNVFQTRAGCLIGAEHVNNSYECDIPIGAGICASYQTQTNSPSGAGSVASQSIIAYTMSLGAENSVAYSNNSIAIPTNFTISVTTEILPVSMTKTSVDCTMYICGDSTECSNLLLQYGSFCTQLNRALTGIAVEQDKNTQEVFAQVKQIYKTPPIKDFGGFNFSQILPDPSKPSKRSFIEDLLFNKVTLADAGFIKQYGDCLGDIAARDLICAQKFNGLTVLPPLLTDEMIAQYTSALLAGTITSGWTFGAGAALQIPFAMQMAYRFNGIGVTQNVLYENQKLIANQFNSAIGKIQDSLSSTASALGKLQDVVNQNAQALNTLVKQLSSNFGAISSVLNDILSRSDPPEAEVQIDRLITGRLQSLQTYVTQQLIRAAEIRASANLAATKMSECVLGQSKRVDFCGKGYHLMSFPQSAPHGVVFLHVTYVPAQEKNFTTAPAICHDGKAHFPREGVFVSNGTHWFVTQRNFYEPQIITTDNTFVSGNCDVVIGIVNNTVYDPLQPELDSFKEELDKYFKNHTSPDVDLGDISGINASVVNIQKEIDRLNEVAKNLNESLIDLQELGKYEQYIKGSGRENLYFQGGGGSGYIPEAPRDGQAYVRKDGEWVLLSTFLGHHHHHHHH

SEQ ID NO: 5620 - protein, 1281 aa, Artificial Sequence
  Description of Artificial Sequence: Synthetic polypeptide
MGILPSPGMPALLSLVSLLSVLLMGCVAETGTQCVNLTTRTQLPPAYTNSFTRGVYYPDKVFRSSVLHSTQDLFLPFFSNVTWFHAIHVSGTNGTKRFDNPVLPFNDGVYFASTEKSNIIRGWIFGTTLDSKTQSLLIVNNATNVVIKVCEFQFCNDPFLGVYYHKNNKSWMESEFRVYSSANNCTFEYVSQPFLMDLEGKQGNFKNLREFVFKNIDGYFKIYSKHTPINLVRDLPQGFSALEPLVDLPIGINITRFQTLLALHRSYLTPGDSSSGWTAGAAAYYVGYLQPRTFLLKYNENGTITDAVDCALDPLSETKCTLKSFTVEKGIYQTSNFRVQPTESIVRFPNITNLCPFGEVFNATRFASVYAWNRKRISNCVADYSVLYNSASFSTFKCYGVSPTKLNDLCFTNVYADSFVIRGDEVRQIAPGQTGKIADYNYKLPDDFTGCVIAWNSNNLDSKVGGNYNYLYRLFRKSNLKPFEVDISTEIYQAGSTPCNGVEGFNCYFPLQSYGFQPTNGVGYQPYRVVVLSFELLHAPATVCGPKKSTNLVKNKCVNFNFNGLTGTGVLTESNKKFLPFQQFGRDIADTTDAVRDPQTLEILDITPCSFGGVSVITPGTNTSNQVAVLYQDVNCTEVPVAIHADQLTPTWRVYSTGSNVFQTRAGCLIGAEHVNNSYECDIPIGAGICASYQTQTNSPSGAGSVASQSIIAYTMSLGAENSVAYSNNSIAIPTNFTISVTTEILPVSMTKTSVDCTMYICGDSTECSNLLLQYGSFCTQLNRALTGIAVEQDKNTQEVFAQVKQIYKTPPIKDFGGFNFSQILPDPSKPSKRSFIEDLLFNKVTLADAGFIKQYGDCLGDIAARDLICAQKFNGLTVLPPLLTDEMIAQYTSALLAGTITSGWTFGAGAALQIPFAMQMAYRFNGIGVTQNVLYENQKLIANQFNSAIGKIQDSLSSTASALGKLQDVVNQNAQALNTLVKQLSSNFGAISSVLNDILSRLDPPEAEVQIDRLITGRLQSLQTYVTQQLIRAAEIRASANLAATKMSECVLGQSKRVDFCGKGYHLMSFPQSAPHGVVFLHVTYVPAQEKNFTTAPAICHDGKAHFPREGVFVSNGTHWFVTQRNFYEPQIITTDNTFVSGNCDVVIGIVNNTVYDPLQPELDSFKEELDKYFKNHTSPDVDLGDISGINASVVNIQKEIDRLNEVAKNLNESLIDLQELGKYEQYIKGSGRENLYFQGGGGSGYIPEAPRDGQAYVRKDGEWVLLSTFLGHHHHHHHH

SEQ ID NO: 5621 - protein, 1281 aa, Artificial Sequence
  Description of Artificial Sequence: Synthetic polypeptide
MGILPSPGMPALLSLVSLLSVLLMGCVAETGTQCVNLTTRTQLPPAYTNSFTRGVYYPDKVFRSSVLHSTQDLFLPFFSNVTWFHAIHVSGTNGTKRFDNPVLPFNDGVYFASTEKSNIIRGWIFGTTLDSKTQSLLIVNNATNVVIKVCEFQFCNDPFLGVYYHKNNKSWMESEFRVYSSANNCTFEYVSQPFLMDLEGKQGNFKNLREFVFKNIDGYFKIYSKHTPINLVRDLPQGFSALEPLVDLPIGINITRFQTLLALHRSYLTPGDSSSGWTAGAAAYYVGYLQPRTFLLKYNENGTITDAVDCALDPLSETKCTLKSFTVEKGIYQTSNFRVQPTESIVRFPNITNLCPFGEVFNATRFASVYAWNRKRISNCVADYSVLYNSASFSTFKCYGVSPTKLNDLCFTNVYADSFVIRGDEVRQIAPGQTGKIADYNYKLPDDFTGCVIAWNSNNLDSKVGGNYNYLYRLFRKSNLKPFERDISTAIYQAGSTPCNGVEGFNCYFPLQSYGFQPTNGVGYQPYRVVVLSFELLHAPATVCGPKKSTNLVKNKCVNFNFNGLTGTGVLTESNKKFLPFQQFGRDIADTTDAVRDPQTLEILDITPCSFGGVSVITPGTNTSNQVAVLYQDVNCTEVPVAIHADQLTPTWRVYSTGSNVFQTRAGCLIGAEHVNNSYECDIPIGAGICASYQTQTNSPSGAGSVASQSIIAYTMSLGAENSVAYSNNSIAIPTNFTISVTTEILPVSMTKTSVDCTMYICGDSTECSNLLLQYGSFCTQLNRALTGIAVEQDKNTQEVFAQVKQIYKTPPIKDFGGFNFSQILPDPSKPSKRSFIEDLLFNKVTLADAGFIKQYGDCLGDIAARDLICAQKFNGLTVLPPLLTDEMIAQYTSALLAGTITSGWTFGAGAALQIPFAMQMAYRFNGIGVTQNVLYENQKLIANQFNSAIGKIQDSLSSTASALGKLQDVVNQNAQALNTLVKQLSSNFGAISSVLNDILSRLDPPEAEVQIDRLITGRLQSLQTYVTQQLIRAAEIRASANLAATKMSECVLGQSKRVDFCGKGYHLMSFPQSAPHGVVFLHVTYVPAQEKNFTTAPAICHDGKAHFPREGVFVSNGTHWFVTQRNFYEPQIITTDNTFVSGNCDVVIGIVNNTVYDPLQPELDSFKEELDKYFKNHTSPDVDLGDISGINASVVNIQKEIDRLNEVAKNLNESLIDLQELGKYEQYIKGSGRENLYFQGGGGSGYIPEAPRDGQAYVRKDGEWVLLSTFLGHHHHHHHH

SEQ ID NO: 5622 - protein, 1281 aa, Artificial Sequence
  Description of Artificial Sequence: Synthetic polypeptide
MGILPSPGMPALLSLVSLLSVLLMGCVAETGTQCVNLTTRTQLPPAYTNSFTRGVYYPDKVFRSSVLHSTQDLFLPFFSNVTWFHAIHVSGTNGTKRFDNPVLPFNDGVYFASTEKSNIIRGWIFGTTLDSKTQSLLIVNNATNVVIKVCEFQFCNDPFLGVYYHKNNKSWMESEFRVYSSANNCTFEYVSQPFLMDLEGKQGNFKNLREFVFKNIDGYFKIYSKHTPINLVRDLPQGFSALEPLVDLPIGINITRFQTLLALHRSYLTPGDSSSGWTAGAAAYYVGYLQPRTFLLKYNENGTITDAVDCALDPLSETKCTLKSFTVEKGIYQTSNFRVQPTESIVRFPNITNLCPFGEVFNATRFASVYAWNRKRISNCVADYSVLYNSASFSTFKCYGVSPTKLNDLCFTNVYADSFVIRGDEVRQIAPGQTGKIADYNYKLPDDFTGCVIAWNSNNLDCKVGGNYNYLYRLFRKSNLKPFERDISTEIYQAGSTPCNGVEGFNCYFPLQSYGFQPTNGVGYQPYRVVVLSFELLHAPATVCGPKKSTNLVKNKCVNFNFNGLTGTGVLTESNKKFLPFQQFGRDIADTTDAVRDPQTLEILDITPCSFGGVSVITPGTNTSNQVAVLYQDVNCTEVPVAIHADQLTPTWRVYSTGSNVFQTRAGCLIGAEHVNNSYECDIPIGAGICASYQTQTNSPSGAGSVASQSIIAYTMSLGAENSVAYSNNSIAIPTNFTISVTTEILPVSMTKTSVDCTMYICGDSTECSNLLLQYGSFCTQLNRALTGIAVEQDKNTQEVFAQVKQIYKTPPIKDFGGFNFSQILPDPSKPSKRSFIEDLLFNKVTLADAGFIKQYGDCLGDIAARDLICAQKFNGLTVLPPLLTDEMIAQYTSALLAGTITSGWTFGAGAALQIPFAMQMAYRFNGIGVTQNVLYENQKLIANQFNSAIGKIQDSLSSTASALGKLQDVVNQNAQALNTLVKQLSSNFGAISSVLNDILSRLDPPEAEVQIDRLITGRLQSLQTYVTQQLIRAAEIRASANLAATKMSECVLGQSKRVDFCGKGYHLMSFPQSAPHGVVFLHVTYVPAQEKNFTTAPAICHDGKAHFPREGVFVSNGTHWFVTQRNFYEPQIITTDNTFVSGNCDVVIGIVNNTVYDPLQPELDSFKEELDKYFKNHTSPDVDLGDISGINASVVNIQKEIDRLNEVAKNLNESLIDLQELGKYEQYIKGSGRENLYFQGGGGSGYIPEAPRDGQAYVRKDGEWVLLSTFLGHHHHHHHH

SEQ ID NO: 5623 - protein, 1281 aa, Artificial Sequence
  Description of Artificial Sequence: Synthetic polypeptide
MGILPSPGMPALLSLVSLLSVLLMGCVAETGTQCVNLTTRTQLPPAYTNSFTRGVYYPDKVFRSSVLHSTQDLFLPFFSNVTWFHAIHVSGTNGTKRFDNPVLPFNDGVYFASTEKSNIIRGWIFGTTLDSKTQSLLIVNNATNVVIKVCEFQFCNDPFLGVYYHKNNKSWMESEFRVYSSANNCTFEYVSQPFLMDLEGKQGNFKNLREFVFKNIDGYFKIYSKHTPINLVRDLPQGFSALEPLVDLPIGINITRFQTLLALHRSYLTPGDSSSGWTAGAAAYYVGYLQPRTFLLKYNENGTITDAVDCALDPLSETKCTLKSFTVEKGIYQTSNFRVQPTESIVRFPNITNLCPFGEVFNATRFASVYAWNRKRISNCVADYSVLYNSASFSTFKCYGVSPTKLNDLCFTNVYADSFVIRGDEVRQIAPGQTGKIADYNYKLPDDFTGCVIAWNSQNLDSKVGGNYNYLYRLFRKSNLKPFERDISTEIYQAGSTPCNGVEGFNCYFPLQSYGFQPTNGVGYQPYRVVVLSFELLHAPATVCGPKKSTNLVKNKCVNFNFNGLTGTGVLTESNKKFLPFQQFGRDIADTTDAVRDPQTLEILDITPCSFGGVSVITPGTNTSNQVAVLYQDVNCTEVPVAIHADQLTPTWRVYSTGSNVFQTRAGCLIGAEHVNNSYECDIPIGAGICASYQTQTNSPSGAGSVASQSIIAYTMSLGAENSVAYSNNSIAIPTNFTISVTTEILPVSMTKTSVDCTMYICGDSTECSNLLLQYGSFCTQLNRALTGIAVEQDKNTQEVFAQVKQIYKTPPIKDFGGFNFSQILPDPSKPSKRSFIEDLLFNKVTLADAGFIKQYGDCLGDIAARDLICAQKFNGLTVLPPLLTDEMIAQYTSALLAGTITSGWTFGAGAALQIPFAMQMAYRFNGIGVTQNVLYENQKLIANQFNSAIGKIQDSLSSTASALGKLQDVVNQNAQALNTLVKQLSSNFGAISSVLNDILSRLDPPEAEVQIDRLITGRLQSLQTYVTQQLIRAAEIRASANLAATKMSECVLGQSKRVDFCGKGYHLMSFPQSAPHGVVFLHVTYVPAQEKNFTTAPAICHDGKAHFPREGVFVSNGTHWFVTQRNFYEPQIITTDNTFVSGNCDVVIGIVNNTVYDPLQPELDSFKEELDKYFKNHTSPDVDLGDISGINASVVNIQKEIDRLNEVAKNLNESLIDLQELGKYEQYIKGSGRENLYFQGGGGSGYIPEAPRDGQAYVRKDGEWVLLSTFLGHHHHHHHH

SEQ ID NO: 5624 - protein, 1281 aa, Artificial Sequence
  Description of Artificial Sequence: Synthetic polypeptide
MGILPSPGMPALLSLVSLLSVLLMGCVAETGTQCVNLTTRTQLPPAYTNSFTRGVYYPDKVFRSSVLHSTQDLFLPFFSNVTWFHAIHVSGTNGTKRFDNPVLPFNDGVYFASTEKSNIIRGWIFGTTLDSKTQSLLIVNNATNVVIKVCEFQFCNDPFLGVYYHKNNKSWMESEFRVYSSANNCTFEYVSQPFLMDLEGKQGNFKNLREFVFKNIDGYFKIYSKHTPINLVRDLPQGFSALEPLVDLPIGINITRFQTLLALHRSYLTPGDSSSGWTAGAAAYYVGYLQPRTFLLKYNENGTITDAVDCALDPLSETKCTLKSFTVEKGIYQTSNFRVQPTESIVRFPNITNLCPFGEVFNATRFASVYAWNRKRISNCVADYSVLYNSASFSTFKCYGVSPTKLNDLCFTNVYADSFVIRGDEVRQIAPGQTGKIADYNYKLPDDFTGCVIAWNSNNLDSKVGGNYNYLYRLFRKSNLKPFERDISTRIYQAGSTPCNGVEGFNCYFPLQSYGFQPTNGVGYQPYRVVVLSFELLHAPATVCGPKKSTNLVKNKCVNFNFNGLTGTGVLTESNKKFLPFQQFGRDIADTTDAVRDPQTLEILDITPCSFGGVSVITPGTNTSNQVAVLYQDVNCTEVPVAIHADQLTPTWRVYSTGSNVFQTRAGCLIGAEHVNNSYECDIPIGAGICASYQTQTNSPSGAGSVASQSIIAYTMSLGAENSVAYSNNSIAIPTNFTISVTTEILPVSMTKTSVDCTMYICGDSTECSNLLLQYGSFCTQLNRALTGIAVEQDKNTQEVFAQVKQIYKTPPIKDFGGFNFSQILPDPSKPSKRSFIEDLLFNKVTLADAGFIKQYGDCLGDIAARDLICAQKFNGLTVLPPLLTDEMIAQYTSALLAGTITSGWTFGAGAALQIPFAMQMAYRFNGIGVTQNVLYENQKLIANQFNSAIGKIQDSLSSTASALGKLQDVVNQNAQALNTLVKQLSSNFGAISSVLNDILSRLDPPEAEVQIDRLITGRLQSLQTYVTQQLIRAAEIRASANLAATKMSECVLGQSKRVDFCGKGYHLMSFPQSAPHGVVFLHVTYVPAQEKNFTTAPAICHDGKAHFPREGVFVSNGTHWFVTQRNFYEPQIITTDNTFVSGNCDVVIGIVNNTVYDPLQPELDSFKEELDKYFKNHTSPDVDLGDISGINASVVNIQKEIDRLNEVAKNLNESLIDLQELGKYEQYIKGSGRENLYFQGGGGSGYIPEAPRDGQAYVRKDGEWVLLSTFLGHHHHHHHH

SEQ ID NO: 5625 - protein, 1281 aa, Artificial Sequence
  Description of Artificial Sequence: Synthetic polypeptide
MGILPSPGMPALLSLVSLLSVLLMGCVAETGTQCVNLTTRTQLPPAYTNSFTRGVYYPDKVFRSSVLHSTQDLFLPFFSNVTWFHAIHVSGTNGTKRFDNPVLPFNDGVYFASTEKSNIIRGWIFGTTLDSKTQSLLIVNNATNVVIKVCEFQFCNDPFLGVYYHKNNKSWMESEFRVYSSANNCTFEYVSQPFLMDLEGKQGNFKNLREFVFKNIDGYFKIYSKHTPINLVRDLPQGFSALEPLVDLPIGINITRFQTLLALHRSYLTPGDSSSGWTAGAAAYYVGYLQPRTFLLKYNENGTITDAVDCALDPLSETKCTLKSFTVEKGIYQTSNFRVQPTESIVRFPNITNLCPFGEVFNATRFASVYAWNRKRISNCVADYSVLYNSASFSTFKCYGVSPTKLNDLCFTNVYADSFVIRGDEVRQIAPGQTGKIADYNYKLPDDFTGCVIAWNSNNLDSKVGGNYNYLYRLFRKSNLKPFERDISTEHYQAGSTPCNGVEGFNCYFPLQSYGFQPTNGVGYQPYRVVVLSFELLHAPATVCGPKKSTNLVKNKCVNFNFNGLTGTGVLTESNKKFLPFQQFGRDIADTTDAVRDPQTLEILDITPCSFGGVSVITPGTNTSNQVAVLYQDVNCTEVPVAIHADQLTPTWRVYSTGSNVFQTRAGCLIGAEHVNNSYECDIPIGAGICASYQTQTNSPSGAGSVASQSIIAYTMSLGAENSVAYSNNSIAIPTNFTISVTTEILPVSMTKTSVDCTMYICGDSTECSNLLLQYGSFCTQLNRALTGIAVEQDKNTQEVFAQVKQIYKTPPIKDFGGFNFSQILPDPSKPSKRSFIEDLLFNKVTLADAGFIKQYGDCLGDIAARDLICAQKFNGLTVLPPLLTDEMIAQYTSALLAGTITSGWTFGAGAALQIPFAMQMAYRFNGIGVTQNVLYENQKLIANQFNSAIGKIQDSLSSTASALGKLQDVVNQNAQALNTLVKQLSSNFGAISSVLNDILSRLDPPEAEVQIDRLITGRLQSLQTYVTQQLIRAAEIRASANLAATKMSECVLGQSKRVDFCGKGYHLMSFPQSAPHGVVFLHVTYVPAQEKNFTTAPAICHDGKAHFPREGVFVSNGTHWFVTQRNFYEPQIITTDNTFVSGNCDVVIGIVNNTVYDPLQPELDSFKEELDKYFKNHTSPDVDLGDISGINASVVNIQKEIDRLNEVAKNLNESLIDLQELGKYEQYIKGSGRENLYFQGGGGSGYIPEAPRDGQAYVRKDGEWVLLSTFLGHHHHHHHH

SEQ ID NO: 5626 - protein, 1281 aa, Artificial Sequence
  Description of Artificial Sequence: Synthetic polypeptide
MGILPSPGMPALLSLVSLLSVLLMGCVAETGTQCVNLTTRTQLPPAYTNSFTRGVYYPDKVFRSSVLHSTQDLFLPFFSNVTWFHAIHVSGTNGTKRFDNPVLPFNDGVYFASTEKSNIIRGWIFGTTLDSKTQSLLIVNNATNVVIKVCEFQFCNDPFLGVYYHKNNKSWMESEFRVYSSANNCTFEYVSQPFLMDLEGKQGNFKNLREFVFKNIDGYFKIYSKHTPINLVRDLPQGFSALEPLVDLPIGINITRFQTLLALHRSYLTPGDSSSGWTAGAAAYYVGYLQPRTFLLKYNENGTITDAVDCALDPLSETKCTLKSFTVEKGIYQTSNFRVQPTESIVRFPNITNLCPFGEVFNATRFASVYAWNRKRISNCVADYSVLYNSASFSTFKCYGVSPTKLNDLCFTNVYADSFVIRGDEVRQIAPGQTGKIADYNYKLPDDFTGCVIAWNSNNLDSKVGGNYNYLYRLFRKSNLKPFERDISDEIYQAGSTPCNGVEGFNCYFPLQSYGFQPTNGVGYQPYRVVVLSFELLHAPATVCGPKKSTNLVKNKCVNFNFNGLTGTGVLTESNKKFLPFQQFGRDIADTTDAVRDPQTLEILDITPCSFGGVSVITPGTNTSNQVAVLYQDVNCTEVPVAIHADQLTPTWRVYSTGSNVFQTRAGCLIGAEHVNNSYECDIPIGAGICASYQTQTNSPSGAGSVASQSIIAYTMSLGAENSVAYSNNSIAIPTNFTISVTTEILPVSMTKTSVDCTMYICGDSTECSNLLLQYGSFCTQLNRALTGIAVEQDKNTQEVFAQVKQIYKTPPIKDFGGFNFSQILPDPSKPSKRSFIEDLLFNKVTLADAGFIKQYGDCLGDIAARDLICAQKFNGLTVLPPLLTDEMIAQYTSALLAGTITSGWTFGAGAALQIPFAMQMAYRFNGIGVTQNVLYENQKLIANQFNSAIGKIQDSLSSTASALGKLQDVVNQNAQALNTLVKQLSSNFGAISSVLNDILSRLDPPEAEVQIDRLITGRLQSLQTYVTQQLIRAAEIRASANLAATKMSECVLGQSKRVDFCGKGYHLMSFPQSAPHGVVFLHVTYVPAQEKNFTTAPAICHDGKAHFPREGVFVSNGTHWFVTQRNFYEPQIITTDNTFVSGNCDVVIGIVNNTVYDPLQPELDSFKEELDKYFKNHTSPDVDLGDISGINASVVNIQKEIDRLNEVAKNLNESLIDLQELGKYEQYIKGSGRENLYFQGGGGSGYIPEAPRDGQAYVRKDGEWVLLSTFLGHHHHHHHH

SEQ ID NO: 5627 - protein, 1281 aa, Artificial Sequence
  Description of Artificial Sequence: Synthetic polypeptide
MGILPSPGMPALLSLVSLLSVLLMGCVAETGTQCVNLTTRTQLPPAYTNSFTRGVYYPDKVFRSSVLHSTQDLFLPFFSNVTWFHAIHVSGTNGTKRFDNPVLPFNDGVYFASTEKSNIIRGWIFGTTLDSKTQSLLIVNNATNVVIKVCEFQFCNDPFLGVYYHKNNKSWMESEFRVYSSANNCTFEYVSQPFLMDLEGKQGNFKNLREFVFKNIDGYFKIYSKHTPINLVRDLPQGFSALEPLVDLPIGINITRFQTLLALHRSYLTPGDSSSGWTAGAAAYYVGYLQPRTFLLKYNENGTITDAVDCALDPLSETKCTLKSFTVEKGIYQTSNFRVQPTESIVRFPNITNLCPFGEVFNATRFASVYAWNRKRISNCVADYSKLYNSASFSTFKCYGVSPTKLNDLCFTNVYADSFVIRGDEVRQIAPGQTGKIADYNYKLPDDFTGCVIAWNSNNLDSKVGGNYNYLYRLFRKSNLKPFERDISTEIYQAGSTPCNGVEGFNCYFPLQSYGFQPTNGVGYQPYRVVVLSFELLHAPATVCGPKKSTNLVKNKCVNFNFNGLTGTGVLTESNKKFLPFQQFGRDIADTTDAVRDPQTLEILDITPCSFGGVSVITPGTNTSNQVAVLYQDVNCTEVPVAIHADQLTPTWRVYSTGSNVFQTRAGCLIGAEHVNNSYECDIPIGAGICASYQTQTNSPSGAGSVASQSIIAYTMSLGAENSVAYSNNSIAIPTNFTISVTTEILPVSMTKTSVDCTMYICGDSTECSNLLLQYGSFCTQLNRALTGIAVEQDKNTQEVFAQVKQIYKTPPIKDFGGFNFSQILPDPSKPSKRSFIEDLLFNKVTLADAGFIKQYGDCLGDIAARDLICAQKFNGLTVLPPLLTDEMIAQYTSALLAGTITSGWTFGAGAALQIPFAMQMAYRFNGIGVTQNVLYENQKLIANQFNSAIGKIQDSLSSTASALGKLQDVVNQNAQALNTLVKQLSSNFGAISSVLNDILSRLDPPEAEVQIDRLITGRLQSLQTYVTQQLIRAAEIRASANLAATKMSECVLGQSKRVDFCGKGYHLMSFPQSAPHGVVFLHVTYVPAQEKNFTTAPAICHDGKAHFPREGVFVSNGTHWFVTQRNFYEPQIITTDNTFVSGNCDVVIGIVNNTVYDPLQPELDSFKEELDKYFKNHTSPDVDLGDISGINASVVNIQKEIDRLNEVAKNLNESLIDLQELGKYEQYIKGSGRENLYFQGGGGSGYIPEAPRDGQAYVRKDGEWVLLSTFLGHHHHHHHH

SEQ ID NO: 5628 - protein, 1281 aa, Artificial Sequence
  Description of Artificial Sequence: Synthetic polypeptide
MGILPSPGMPALLSLVSLLSVLLMGCVAETGTQCVNLTTRTQLPPAYTNSFTRGVYYPDKVFRSSVLHSTQDLFLPFFSNVTWFHAIHVSGTNGTKRFDNPVLPFNDGVYFASTEKSNIIRGWIFGTTLDSKTQSLLIVNNATNVVIKVCEFQFCNDPFLGVYYHKNNKSWMESEFRVYSSANNCTFEYVSQPFLMDLEGKQGNFKNLREFVFKNIDGYFKIYSKHTPINLVRDLPQGFSALEPLVDLPIGINITRFQTLLALHRSYLTPGDSSSGWTAGAAAYYVGYLQPRTFLLKYNENGTITDAVDCALDPLSETKCTLKSFTVEKGIYQTSNFRVQPTESIVRFPNITNLCPFGEVFNATRFASVYAWNRKRISNCVADYSTLYNSASFSTFKCYGVSPTKLNDLCFTNVYADSFVIRGDEVRQIAPGQTGKIADYNYKLPDDFTGCVIAWNSNNLDSKVGGNYNYLYRLFRKSNLKPFERDISTEIYQAGSTPCNGVEGFNCYFPLQSYGFQPTNGVGYQPYRVVVLSFELLHAPATVCGPKKSTNLVKNKCVNFNFNGLTGTGVLTESNKKFLPFQQFGRDIADTTDAVRDPQTLEILDITPCSFGGVSVITPGTNTSNQVAVLYQDVNCTEVPVAIHADQLTPTWRVYSTGSNVFQTRAGCLIGAEHVNNSYECDIPIGAGICASYQTQTNSPSGAGSVASQSIIAYTMSLGAENSVAYSNNSIAIPTNFTISVTTEILPVSMTKTSVDCTMYICGDSTECSNLLLQYGSFCTQLNRALTGIAVEQDKNTQEVFAQVKQIYKTPPIKDFGGFNFSQILPDPSKPSKRSFIEDLLFNKVTLADAGFIKQYGDCLGDIAARDLICAQKFNGLTVLPPLLTDEMIAQYTSALLAGTITSGWTFGAGAALQIPFAMQMAYRFNGIGVTQNVLYENQKLIANQFNSAIGKIQDSLSSTASALGKLQDVVNQNAQALNTLVKQLSSNFGAISSVLNDILSRLDPPEAEVQIDRLITGRLQSLQTYVTQQLIRAAEIRASANLAATKMSECVLGQSKRVDFCGKGYHLMSFPQSAPHGVVFLHVTYVPAQEKNFTTAPAICHDGKAHFPREGVFVSNGTHWFVTQRNFYEPQIITTDNTFVSGNCDVVIGIVNNTVYDPLQPELDSFKEELDKYFKNHTSPDVDLGDISGINASVVNIQKEIDRLNEVAKNLNESLIDLQELGKYEQYIKGSGRENLYFQGGGGSGYIPEAPRDGQAYVRKDGEWVLLSTFLGHHHHHHHH

SEQ ID NO: 5629 - protein, 1281 aa, Artificial Sequence
  Description of Artificial Sequence: Synthetic polypeptide
MGILPSPGMPALLSLVSLLSVLLMGCVAETGTQCVNLTTRTQLPPAYTNSFTRGVYYPDKVFRSSVLHSTQDLFLPFFSNVTWFHAIHVSGTNGTKRFDNPVLPFNDGVYFASTEKSNIIRGWIFGTTLDSKTQSLLIVNNATNVVIKVCEFQFCNDPFLGVYYHKNNKSWMESEFRVYSSANNCTFEYVSQPFLMDLEGKQGNFKNLREFVFKNIDGYFKIYSKHTPINLVRDLPQGFSALEPLVDLPIGINITRFQTLLALHRSYLTPGDSSSGWTAGAAAYYVGYLQPRTFLLKYNENGTITDAVDCALDPLSETKCTLKSFTVEKGIYQTSNFRVQPTESIVRFPNITNLCPFGEVFNATRFASVYAWNRKRISNCVADYSVLYNSASFSTFKCYGVSPTKLNDLCFTNVYADSFVIRGDEVRQIAPGQTGKIADYNYKLPDDFTGCVIAWNSRNLDSKVGGNYNYLYRLFRKSNLKPFERDISTEIYQAGSTPCNGVEGFNCYFPLQSYGFQPTNGVGYQPYRVVVLSFELLHAPATVCGPKKSTNLVKNKCVNFNFNGLTGTGVLTESNKKFLPFQQFGRDIADTTDAVRDPQTLEILDITPCSFGGVSVITPGTNTSNQVAVLYQDVNCTEVPVAIHADQLTPTWRVYSTGSNVFQTRAGCLIGAEHVNNSYECDIPIGAGICASYQTQTNSPSGAGSVASQSIIAYTMSLGAENSVAYSNNSIAIPTNFTISVTTEILPVSMTKTSVDCTMYICGDSTECSNLLLQYGSFCTQLNRALTGIAVEQDKNTQEVFAQVKQIYKTPPIKDFGGFNFSQILPDPSKPSKRSFIEDLLFNKVTLADAGFIKQYGDCLGDIAARDLICAQKFNGLTVLPPLLTDEMIAQYTSALLAGTITSGWTFGAGAALQIPFAMQMAYRFNGIGVTQNVLYENQKLIANQFNSAIGKIQDSLSSTASALGKLQDVVNQNAQALNTLVKQLSSNFGAISSVLNDILSRLDPPEAEVQIDRLITGRLQSLQTYVTQQLIRAAEIRASANLAATKMSECVLGQSKRVDFCGKGYHLMSFPQSAPHGVVFLHVTYVPAQEKNFTTAPAICHDGKAHFPREGVFVSNGTHWFVTQRNFYEPQIITTDNTFVSGNCDVVIGIVNNTVYDPLQPELDSFKEELDKYFKNHTSPDVDLGDISGINASVVNIQKEIDRLNEVAKNLNESLIDLQELGKYEQYIKGSGRENLYFQGGGGSGYIPEAPRDGQAYVRKDGEWVLLSTFLGHHHHHHHH

SEQ ID NO: 5630 - protein, 1281 aa, Artificial Sequence
  Description of Artificial Sequence: Synthetic polypeptide
MGILPSPGMPALLSLVSLLSVLLMGCVAETGTQCVNLTTRTQLPPAYTNSFTRGVYYPDKVFRSSVLHSTQDLFLPFFSNVTWFHAIHVSGTNGTKRFDNPVLPFNDGVYFASTEKSNIIRGWIFGTTLDSKTQSLLIVNNATNVVIKVCEFQFCNDPFLGVYYHKNNKSWMESEFRVYSSANNCTFEYVSQPFLMDLEGKQGNFKNLREFVFKNIDGYFKIYSKHTPINLVRDLPQGFSALEPLVDLPIGINITRFQTLLALHRSYLTPGDSSSGWTAGAAAYYVGYLQPRTFLLKYNENGTITDAVDCALDPLSETKCTLKSFTVEKGIYQTSNFRVQPTESIVRFPNITNLCPFGEVFNATRFASVYAWNRKRISNCVADYSVLYNSASFSTFKCYGVSPTKLNDLCFTNVYADSFVIRGDEVRQIAPGQTGKIADYNYKLPDDFTGCVIAWNSNNLDSKVGGNYNYLYRLFRKSNLKPFERDISTEIYQAGSTPCNGVEGFNCYFPLQSYGFQPTNGVGYQPYRVVVLEFELLHAPATVCGPKKSTNLVKNKCVNFNFNGLTGTGVLTESNKKFLPFQQFGRDIADTTDAVRDPQTLEILDITPCSFGGVSVITPGTNTSNQVAVLYQDVNCTEVPVAIHADQLTPTWRVYSTGSNVFQTRAGCLIGAEHVNNSYECDIPIGAGICASYQTQTNSPSGAGSVASQSIIAYTMSLGAENSVAYSNNSIAIPTNFTISVTTEILPVSMTKTSVDCTMYICGDSTECSNLLLQYGSFCTQLNRALTGIAVEQDKNTQEVFAQVKQIYKTPPIKDFGGFNFSQILPDPSKPSKRSFIEDLLFNKVTLADAGFIKQYGDCLGDIAARDLICAQKFNGLTVLPPLLTDEMIAQYTSALLAGTITSGWTFGAGAALQIPFAMQMAYRFNGIGVTQNVLYENQKLIANQFNSAIGKIQDSLSSTASALGKLQDVVNQNAQALNTLVKQLSSNFGAISSVLNDILSRLDPPEAEVQIDRLITGRLQSLQTYVTQQLIRAAEIRASANLAATKMSECVLGQSKRVDFCGKGYHLMSFPQSAPHGVVFLHVTYVPAQEKNFTTAPAICHDGKAHFPREGVFVSNGTHWFVTQRNFYEPQIITTDNTFVSGNCDVVIGIVNNTVYDPLQPELDSFKEELDKYFKNHTSPDVDLGDISGINASVVNIQKEIDRLNEVAKNLNESLIDLQELGKYEQYIKGSGRENLYFQGGGGSGYIPEAPRDGQAYVRKDGEWVLLSTFLGHHHHHHHH

SEQ ID NO: 5631 - protein, 1281 aa, Artificial Sequence
  Description of Artificial Sequence: Synthetic polypeptide
MGILPSPGMPALLSLVSLLSVLLMGCVAETGTQCVNLTTRTQLPPAYTNSFTRGVYYPDKVFRSSVLHSTQDLFLPFFSNVTWFHAIHVSGTNGTKRFDNPVLPFNDGVYFASTEKSNIIRGWIFGTTLDSKTQSLLIVNNATNVVIKVCEFQFCNDPFLGVYYHKNNKSWMESEFRVYSSANNCTFEYVSQPFLMDLEGKQGNFKNLREFVFKNIDGYFKIYSKHTPINLVRDLPQGFSALEPLVDLPIGINITRFQTLLALHRSYLTPGDSSSGWTAGAAAYYVGYLQPRTFLLKYNENGTITDAVDCALDPLSETKCTLKSFTVEKGIYQTSNFRVQPTESIVRFPNITNLCPFGEVFNATRFASVYAWNRKRISNCVADYSVLYNSASFSTFKCYGVSPTKLNDLCFTNVYADSFVIRGDEVRQIAPGQTGKIADYNYKLPDDFTGCVIAWNSNNLDSKVGGNYNYLYRLFRKSNLKPFERDISTEIYQAGSTPCNGVEGFNCYFPLQSYGFQPTNGVGYQPYRVVVLSFELLYAPATVCGPKKSTNLVKNKCVNFNFNGLTGTGVLTESNKKFLPFQQFGRDIADTTDAVRDPQTLEILDITPCSFGGVSVITPGTNTSNQVAVLYQDVNCTEVPVAIHADQLTPTWRVYSTGSNVFQTRAGCLIGAEHVNNSYECDIPIGAGICASYQTQTNSPSGAGSVASQSIIAYTMSLGAENSVAYSNNSIAIPTNFTISVTTEILPVSMTKTSVDCTMYICGDSTECSNLLLQYGSFCTQLNRALTGIAVEQDKNTQEVFAQVKQIYKTPPIKDFGGFNFSQILPDPSKPSKRSFIEDLLFNKVTLADAGFIKQYGDCLGDIAARDLICAQKFNGLTVLPPLLTDEMIAQYTSALLAGTITSGWTFGAGAALQIPFAMQMAYRFNGIGVTQNVLYENQKLIANQFNSAIGKIQDSLSSTASALGKLQDVVNQNAQALNTLVKQLSSNFGAISSVLNDILSRLDPPEAEVQIDRLITGRLQSLQTYVTQQLIRAAEIRASANLAATKMSECVLGQSKRVDFCGKGYHLMSFPQSAPHGVVFLHVTYVPAQEKNFTTAPAICHDGKAHFPREGVFVSNGTHWFVTQRNFYEPQIITTDNTFVSGNCDVVIGIVNNTVYDPLQPELDSFKEELDKYFKNHTSPDVDLGDISGINASVVNIQKEIDRLNEVAKNLNESLIDLQELGKYEQYIKGSGRENLYFQGGGGSGYIPEAPRDGQAYVRKDGEWVLLSTFLGHHHHHHHH

SEQ ID NO: 5632 - protein, 1281 aa, Artificial Sequence
  Description of Artificial Sequence: Synthetic polypeptide
MGILPSPGMPALLSLVSLLSVLLMGCVAETGTQCVNLTTRTQLPPAYTNSFTRGVYYPDKVFRSSVLHSTQDLFLPFFSNVTWFHAIHVSGTNGTKRFDNPVLPFNDGVYFASTEKSNIIRGWIFGTTLDSKTQSLLIVNNATNVVIKVCEFQFCNDPFLGVYYHKNNKSWMESEFRVYSSANNCTFEYVSQPFLMDLEGKQGNFKNLREFVFKNIDGYFKIYSKHTPINLVRDLPQGFSALEPLVDLPIGINITRFQTLLALHRSYLTPGDSSSGWTAGAAAYYVGYLQPRTFLLKYNENGTITDAVDCALDPLSETKCTLKSFTVEKGIYQTSNFRVQPTESIVRFPNITNLCPFGEVFNATRFASVYAWNRKRISNCVADYSVLYNSASFSTFKCYGVSPTKLNDLCFTNVYADSFVIRGDEVRQIAPGQTGKIADYNYKLPDDFTGCVIAWNSNNLDSKVGGNYNYLYRLFRKSNLKPFERDIKTEIYQAGSTPCNGVEGFNCYFPLQSYGFQPTNGVGYQPYRVVVLSFELLHAPATVCGPKKSTNLVKNKCVNFNFNGLTGTGVLTESNKKFLPFQQFGRDIADTTDAVRDPQTLEILDITPCSFGGVSVITPGTNTSNQVAVLYQDVNCTEVPVAIHADQLTPTWRVYSTGSNVFQTRAGCLIGAEHVNNSYECDIPIGAGICASYQTQTNSPSGAGSVASQSIIAYTMSLGAENSVAYSNNSIAIPTNFTISVTTEILPVSMTKTSVDCTMYICGDSTECSNLLLQYGSFCTQLNRALTGIAVEQDKNTQEVFAQVKQIYKTPPIKDFGGFNFSQILPDPSKPSKRSFIEDLLFNKVTLADAGFIKQYGDCLGDIAARDLICAQKFNGLTVLPPLLTDEMIAQYTSALLAGTITSGWTFGAGAALQIPFAMQMAYRFNGIGVTQNVLYENQKLIANQFNSAIGKIQDSLSSTASALGKLQDVVNQNAQALNTLVKQLSSNFGAISSVLNDILSRLDPPEAEVQIDRLITGRLQSLQTYVTQQLIRAAEIRASANLAATKMSECVLGQSKRVDFCGKGYHLMSFPQSAPHGVVFLHVTYVPAQEKNFTTAPAICHDGKAHFPREGVFVSNGTHWFVTQRNFYEPQIITTDNTFVSGNCDVVIGIVNNTVYDPLQPELDSFKEELDKYFKNHTSPDVDLGDISGINASVVNIQKEIDRLNEVAKNLNESLIDLQELGKYEQYIKGSGRENLYFQGGGGSGYIPEAPRDGQAYVRKDGEWVLLSTFLGHHHHHHHH

SEQ ID NO: 5633 - protein, 1281 aa, Artificial Sequence
  Description of Artificial Sequence: Synthetic polypeptide
MGILPSPGMPALLSLVSLLSVLLMGCVAETGTQCVNLTTRTQLPPAYTNSFTRGVYYPDKVFRSSVLHSTQDLFLPFFSNVTWFHAIHVSGTNGTKRFDNPVLPFNDGVYFASTEKSNIIRGWIFGTTLDSKTQSLLIVNNATNVVIKVCEFQFCNDPFLGVYYHKNNKSWMESEFRVYSSANNCTFEYVSQPFLMDLEGKQGNFKNLREFVFKNIDGYFKIYSKHTPINLVRDLPQGFSALEPLVDLPIGINITRFQTLLALHRSYLTPGDSSSGWTAGAAAYYVGYLQPRTFLLKYNENGTITDAVDCALDPLSETKCTLKSFTVEKGIYQTSNFRVQPTESIVRFPNITNLCPFGEVFNATRFASVYAWNRKRISNCVADYSVLYNSASFSTFKCYGVSPTKLNDLCFTNVYADSFVIRGDEVRQIAPGQTGKIADYNYKLPDDFTGCVIAWNSNNLDSKVGGNYNYLYRLFRKSNLKPFERDISTEIYQAGSTPCNGVEGFNCYFPLQSYGFQPTNGVGYQPYRVVVLSFELIHAPATVCGPKKSTNLVKNKCVNFNFNGLTGTGVLTESNKKFLPFQQFGRDIADTTDAVRDPQTLEILDITPCSFGGVSVITPGTNTSNQVAVLYQDVNCTEVPVAIHADQLTPTWRVYSTGSNVFQTRAGCLIGAEHVNNSYECDIPIGAGICASYQTQTNSPSGAGSVASQSIIAYTMSLGAENSVAYSNNSIAIPTNFTISVTTEILPVSMTKTSVDCTMYICGDSTECSNLLLQYGSFCTQLNRALTGIAVEQDKNTQEVFAQVKQIYKTPPIKDFGGFNFSQILPDPSKPSKRSFIEDLLFNKVTLADAGFIKQYGDCLGDIAARDLICAQKFNGLTVLPPLLTDEMIAQYTSALLAGTITSGWTFGAGAALQIPFAMQMAYRFNGIGVTQNVLYENQKLIANQFNSAIGKIQDSLSSTASALGKLQDVVNQNAQALNTLVKQLSSNFGAISSVLNDILSRLDPPEAEVQIDRLITGRLQSLQTYVTQQLIRAAEIRASANLAATKMSECVLGQSKRVDFCGKGYHLMSFPQSAPHGVVFLHVTYVPAQEKNFTTAPAICHDGKAHFPREGVFVSNGTHWFVTQRNFYEPQIITTDNTFVSGNCDVVIGIVNNTVYDPLQPELDSFKEELDKYFKNHTSPDVDLGDISGINASVVNIQKEIDRLNEVAKNLNESLIDLQELGKYEQYIKGSGRENLYFQGGGGSGYIPEAPRDGQAYVRKDGEWVLLSTFLGHHHHHHHH

SEQ ID NO: 5634 - protein, 1281 aa, Artificial Sequence
  Description of Artificial Sequence: Synthetic polypeptide
MGILPSPGMPALLSLVSLLSVLLMGCVAETGTQCVNLTTRTQLPPAYTNSFTRGVYYPDKVFRSSVLHSTQDLFLPFFSNVTWFHAIHVSGTNGTKRFDNPVLPFNDGVYFASTEKSNIIRGWIFGTTLDSKTQSLLIVNNATNVVIKVCEFQFCNDPFLGVYYHKNNKSWMESEFRVYSSANNCTFEYVSQPFLMDLEGKQGNFKNLREFVFKNIDGYFKIYSKHTPINLVRDLPQGFSALEPLVDLPIGINITRFQTLLALHRSYLTPGDSSSGWTAGAAAYYVGYLQPRTFLLKYNENGTITDAVDCALDPLSETKCTLKSFTVEKGIYQTSNFRVQPTESIVRFPNITNLCPFGEVFNATRFASVYAWNRKRISNCVADYSVLYNSASFSTFKCYGVSPTKLNDLCFTNVYADSFVIRGDEVRQIAPGQTGKIADYNYKLPDDFTGCVIAWNSNNLDSKVGGNYNYLYRLFRKSNLKPFERDISTEIYQAGSTPCNGVEGFNCYFPLQSYGFQPTNGVGYQPYRVVVLSFELLHAPATVCGPKKSTNLVKNKCVNFNFNGLTGTGVLTESNKKFLPFQQFGRDIADTTDAVRDPQTLEILDITPCSFGGVSVITPGTNTSNQVAVLYQDVNCTEVPVAIHADQLTPTWRVYSTGSNVFQTRAGCLIGAEHVNNSYECDIPIGAGICASYQTQTNSPSGAGSVASQSIIAYTMSLGAENSVAYSNNSIAIPTNFTISVTTEILPVSMTKTSVDCTMYICGDSTECSNLLLQYGSFCTQLNRALTGIAVEQDKNTQEVFAQVKQIYKTPPIKDFGGFNFSQILPDPSKPSKRSFIEDLLFNKVTLADAGFIKQYGDCLGDIAARDLICAQKFNGLTVLPPLLTDEMIAQYTSALLAGTITSGWTFGAGAALQIPFAMQMAYRFNGIGVTQNVLYENQKLIANQFNSAIGKIQDSLSSTASALGKLQDVVNQNAQALNTLVKQLSSNFGAISSVLNDILSRLAPPEAEVQIDRLITGRLQSLQTYVTQQLIRAAEIRASANLAATKMSECVLGQSKRVDFCGKGYHLMSFPQSAPHGVVFLHVTYVPAQEKNFTTAPAICHDGKAHFPREGVFVSNGTHWFVTQRNFYEPQIITTDNTFVSGNCDVVIGIVNNTVYDPLQPELDSFKEELDKYFKNHTSPDVDLGDISGINASVVNIQKEIDRLNEVAKNLNESLIDLQELGKYEQYIKGSGRENLYFQGGGGSGYIPEAPRDGQAYVRKDGEWVLLSTFLGHHHHHHHH

SEQ ID NO: 5635 - protein, 1281 aa, Artificial Sequence
  Description of Artificial Sequence: Synthetic polypeptide
MGILPSPGMPALLSLVSLLSVLLMGCVAETGTQCVNLTTRTQLPPAYTNSFTRGVYYPDKVFRSSVLHSTQDLFLPFFSNVTWFHAIHVSGTNGTKRFDNPVLPFNDGVYFASTEKSNIIRGWIFGTTLDSKTQSLLIVNNATNVVIKVCEFQFCNDPFLGVYYHKNNKSWMESEFRVYSSANNCTFEYVSQPFLMDLEGKQGNFKNLREFVFKNIDGYFKIYSKHTPINLVRDLPQGFSALEPLVDLPIGINITRFQTLLALHRSYLTPGDSSSGWTAGAAAYYVGYLQPRTFLLKYNENGTITDAVDCALDPLSETKCTLKSFTVEKGIYQTSNFRVQPTESIVRFPNITNLCPFGEVFNATRFASVYAWNRKRISNCVADYSVLYNSASFSTFKCYGVSPTKLNDLCFTNVYADSFVIRGDEVRQIAPGQTGKIADYNYKLPDDFTGCVIAWNSNNLDSKVGGNYNYLYRLFRKSNLKPFERDISTEIYQAGSTPCNGVEGFNCYFPLQSYGFQPTNGVGYQPYRVVVLSFELLAAPATVCGPKKSTNLVKNKCVNFNFNGLTGTGVLTESNKKFLPFQQFGRDIADTTDAVRDPQTLEILDITPCSFGGVSVITPGTNTSNQVAVLYQDVNCTEVPVAIHADQLTPTWRVYSTGSNVFQTRAGCLIGAEHVNNSYECDIPIGAGICASYQTQTNSPSGAGSVASQSIIAYTMSLGAENSVAYSNNSIAIPTNFTISVTTEILPVSMTKTSVDCTMYICGDSTECSNLLLQYGSFCTQLNRALTGIAVEQDKNTQEVFAQVKQIYKTPPIKDFGGFNFSQILPDPSKPSKRSFIEDLLFNKVTLADAGFIKQYGDCLGDIAARDLICAQKFNGLTVLPPLLTDEMIAQYTSALLAGTITSGWTFGAGAALQIPFAMQMAYRFNGIGVTQNVLYENQKLIANQFNSAIGKIQDSLSSTASALGKLQDVVNQNAQALNTLVKQLSSNFGAISSVLNDILSRLDPPEAEVQIDRLITGRLQSLQTYVTQQLIRAAEIRASANLAATKMSECVLGQSKRVDFCGKGYHLMSFPQSAPHGVVFLHVTYVPAQEKNFTTAPAICHDGKAHFPREGVFVSNGTHWFVTQRNFYEPQIITTDNTFVSGNCDVVIGIVNNTVYDPLQPELDSFKEELDKYFKNHTSPDVDLGDISGINASVVNIQKEIDRLNEVAKNLNESLIDLQELGKYEQYIKGSGRENLYFQGGGGSGYIPEAPRDGQAYVRKDGEWVLLSTFLGHHHHHHHH

SEQ ID NO: 5636 - protein, 1281 aa, Artificial Sequence
  Description of Artificial Sequence: Synthetic polypeptide
MGILPSPGMPALLSLVSLLSVLLMGCVAETGTQCVNLTTRTQLPPAYTNSFTRGVYYPDKVFRSSVLHSTQDLFLPFFSNVTWFHAIHVSGTNGTKRFDNPVLPFNDGVYFASTEKSNIIRGWIFGTTLDSKTQSLLIVNNATNVVIKVCEFQFCNDPFLGVYYHKNNKSWMESEFRVYSSANNCTFEYVSQPFLMDLEGKQGNFKNLREFVFKNIDGYFKIYSKHTPINLVRDLPQGFSALEPLVDLPIGINITRFQTLLALHRSYLTPGDSSSGWTAGAAAYYVGYLQPRTFLLKYNENGTITDAVDCALDPLSETKCTLKSFTVEKGIYQTSNFRVQPTESIVRFPNITNLCPFGEVFNATRFASVYAWNRKRISNCVADYSVLYNSASFSTFKCYGVSPTKLNDLCFTNVYADSFVIRGDEVRQIAPGQTGKIADYNYKLPDDFTGCVIAWNSNNLDSKVGGNYNYLYRLFRKSNLKPFERDISTKIYQAGSTPCNGVEGFNCYFPLQSYGFQPTNGVGYQPYRVVVLSFELLHAPATVCGPKKSTNLVKNKCVNFNFNGLTGTGVLTESNKKFLPFQQFGRDIADTTDAVRDPQTLEILDITPCSFGGVSVITPGTNTSNQVAVLYQDVNCTEVPVAIHADQLTPTWRVYSTGSNVFQTRAGCLIGAEHVNNSYECDIPIGAGICASYQTQTNSPSGAGSVASQSIIAYTMSLGAENSVAYSNNSIAIPTNFTISVTTEILPVSMTKTSVDCTMYICGDSTECSNLLLQYGSFCTQLNRALTGIAVEQDKNTQEVFAQVKQIYKTPPIKDFGGFNFSQILPDPSKPSKRSFIEDLLFNKVTLADAGFIKQYGDCLGDIAARDLICAQKFNGLTVLPPLLTDEMIAQYTSALLAGTITSGWTFGAGAALQIPFAMQMAYRFNGIGVTQNVLYENQKLIANQFNSAIGKIQDSLSSTASALGKLQDVVNQNAQALNTLVKQLSSNFGAISSVLNDILSRLDPPEAEVQIDRLITGRLQSLQTYVTQQLIRAAEIRASANLAATKMSECVLGQSKRVDFCGKGYHLMSFPQSAPHGVVFLHVTYVPAQEKNFTTAPAICHDGKAHFPREGVFVSNGTHWFVTQRNFYEPQIITTDNTFVSGNCDVVIGIVNNTVYDPLQPELDSFKEELDKYFKNHTSPDVDLGDISGINASVVNIQKEIDRLNEVAKNLNESLIDLQELGKYEQYIKGSGRENLYFQGGGGSGYIPEAPRDGQAYVRKDGEWVLLSTFLGHHHHHHHH

SEQ ID NO: 5637 - protein, 1281 aa, Artificial Sequence
  Description of Artificial Sequence: Synthetic polypeptide
MGILPSPGMPALLSLVSLLSVLLMGCVAETGTQCVNLTTRTQLPPAYTNSFTRGVYYPDKVFRSSVLHSTQDLFLPFFSNVTWFHAIHVSGTNGTKRFDNPVLPFNDGVYFASTEKSNIIRGWIFGTTLDSKTQSLLIVNNATNVVIKVCEFQFCNDPFLGVYYHKNNKSWMESEFRVYSSANNCTFEYVSQPFLMDLEGKQGNFKNLREFVFKNIDGYFKIYSKHTPINLVRDLPQGFSALEPLVDLPIGINITRFQTLLALHRSYLTPGDSSSGWTAGAAAYYVGYLQPRTFLLKYNENGTITDAVDCALDPLSETKCTLKSFTVEKGIYQTSNFRVQPTESIVRFPNITNLCPFGEVFNATRFASVYAWNRKRISNCVADYSVLYNSASFSTFKCYGVSPTKLNDLCFTNVYADSFVIRGDEVRQIAPGQTGKIADYNYKLPDDFTGCVIAWNSNNLDSKVGGNYNYLYRLFRKSNLKPFERDISTEIYQAGSTPCNGVEGFNCYFPLQSYGFQPTNGVGYQPYRVVVLSFELRHAPATVCGPKKSTNLVKNKCVNFNFNGLTGTGVLTESNKKFLPFQQFGRDIADTTDAVRDPQTLEILDITPCSFGGVSVITPGTNTSNQVAVLYQDVNCTEVPVAIHADQLTPTWRVYSTGSNVFQTRAGCLIGAEHVNNSYECDIPIGAGICASYQTQTNSPSGAGSVASQSIIAYTMSLGAENSVAYSNNSIAIPTNFTISVTTEILPVSMTKTSVDCTMYICGDSTECSNLLLQYGSFCTQLNRALTGIAVEQDKNTQEVFAQVKQIYKTPPIKDFGGFNFSQILPDPSKPSKRSFIEDLLFNKVTLADAGFIKQYGDCLGDIAARDLICAQKFNGLTVLPPLLTDEMIAQYTSALLAGTITSGWTFGAGAALQIPFAMQMAYRFNGIGVTQNVLYENQKLIANQFNSAIGKIQDSLSSTASALGKLQDVVNQNAQALNTLVKQLSSNFGAISSVLNDILSRLDPPEAEVQIDRLITGRLQSLQTYVTQQLIRAAEIRASANLAATKMSECVLGQSKRVDFCGKGYHLMSFPQSAPHGVVFLHVTYVPAQEKNFTTAPAICHDGKAHFPREGVFVSNGTHWFVTQRNFYEPQIITTDNTFVSGNCDVVIGIVNNTVYDPLQPELDSFKEELDKYFKNHTSPDVDLGDISGINASVVNIQKEIDRLNEVAKNLNESLIDLQELGKYEQYIKGSGRENLYFQGGGGSGYIPEAPRDGQAYVRKDGEWVLLSTFLGHHHHHHHH

SEQ ID NO: 5638 - protein, 1281 aa, Artificial Sequence
  Description of Artificial Sequence: Synthetic polypeptide
MGILPSPGMPALLSLVSLLSVLLMGCVAETGTQCVNLTTRTQLPPAYTNSFTRGVYYPDKVFRSSVLHSTQDLFLPFFSNVTWFHAIHVSGTNGTKRFDNPVLPFNDGVYFASTEKSNIIRGWIFGTTLDSKTQSLLIVNNATNVVIKVCEFQFCNDPFLGVYYHKNNKSWMESEFRVYSSANNCTFEYVSQPFLMDLEGKQGNFKNLREFVFKNIDGYFKIYSKHTPINLVRDLPQGFSALEPLVDLPIGINITRFQTLLALHRSYLTPGDSSSGWTAGAAAYYVGYLQPRTFLLKYNENGTITDAVDCALDPLSETKCTLKSFTVEKGIYQTSNFRVQPTESIVRFPNITNLCPFGEVFNATRFASVYAWNRKRISNCVADYSVLYNSASFSTFKCYGVSPTKLNDLCFTNVYADSFVIRGDEVRQIAPGQTGKIADYNYKLPDDFTGCVIAWNSNNLDSKVGGNYNYLYRLFRKSNLQPFERDISTEIYQAGSTPCNGVEGFNCYFPLQSYGFQPTNGVGYQPYRVVVLSFELLHAPATVCGPKKSTNLVKNKCVNFNFNGLTGTGVLTESNKKFLPFQQFGRDIADTTDAVRDPQTLEILDITPCSFGGVSVITPGTNTSNQVAVLYQDVNCTEVPVAIHADQLTPTWRVYSTGSNVFQTRAGCLIGAEHVNNSYECDIPIGAGICASYQTQTNSPSGAGSVASQSIIAYTMSLGAENSVAYSNNSIAIPTNFTISVTTEILPVSMTKTSVDCTMYICGDSTECSNLLLQYGSFCTQLNRALTGIAVEQDKNTQEVFAQVKQIYKTPPIKDFGGFNFSQILPDPSKPSKRSFIEDLLFNKVTLADAGFIKQYGDCLGDIAARDLICAQKFNGLTVLPPLLTDEMIAQYTSALLAGTITSGWTFGAGAALQIPFAMQMAYRFNGIGVTQNVLYENQKLIANQFNSAIGKIQDSLSSTASALGKLQDVVNQNAQALNTLVKQLSSNFGAISSVLNDILSRLDPPEAEVQIDRLITGRLQSLQTYVTQQLIRAAEIRASANLAATKMSECVLGQSKRVDFCGKGYHLMSFPQSAPHGVVFLHVTYVPAQEKNFTTAPAICHDGKAHFPREGVFVSNGTHWFVTQRNFYEPQIITTDNTFVSGNCDVVIGIVNNTVYDPLQPELDSFKEELDKYFKNHTSPDVDLGDISGINASVVNIQKEIDRLNEVAKNLNESLIDLQELGKYEQYIKGSGRENLYFQGGGGSGYIPEAPRDGQAYVRKDGEWVLLSTFLGHHHHHHHH

SEQ ID NO: 5639 - protein, 1281 aa, Artificial Sequence
  Description of Artificial Sequence: Synthetic polypeptide
MGILPSPGMPALLSLVSLLSVLLMGCVAETGTQCVNLTTRTQLPPAYTNSFTRGVYYPDKVFRSSVLHSTQDLFLPFFSNVTWFHAIHVSGTNGTKRFDNPVLPFNDGVYFASTEKSNIIRGWIFGTTLDSKTQSLLIVNNATNVVIKVCEFQFCNDPFLGVYYHKNNKSWMESEFRVYSSANNCTFEYVSQPFLMDLEGKQGNFKNLREFVFKNIDGYFKIYSKHTPINLVRDLPQGFSALEPLVDLPIGINITRFQTLLALHRSYLTPGDSSSGWTAGAAAYYVGYLQPRTFLLKYNENGTITDAVDCALDPLSETKCTLKSFTVEKGIYQTSNFRVQPTESIVRFPNITNLCPFGEVFNATRFASVYAWNRKRISNCVADYSVLYNSASFSTFKCYGVSPTKLNDLCFTNVYADSFVIRGDEVRQIAPGQTGKIADYNYKLPDDFTGCVIAWNSNGLDSKVGGNYNYLYRLFRKSNLKPFERDISTEIYQAGSTPCNGVEGFNCYFPLQSYGFQPTNGVGYQPYRVVVLSFELLHAPATVCGPKKSTNLVKNKCVNFNFNGLTGTGVLTESNKKFLPFQQFGRDIADTTDAVRDPQTLEILDITPCSFGGVSVITPGTNTSNQVAVLYQDVNCTEVPVAIHADQLTPTWRVYSTGSNVFQTRAGCLIGAEHVNNSYECDIPIGAGICASYQTQTNSPSGAGSVASQSIIAYTMSLGAENSVAYSNNSIAIPTNFTISVTTEILPVSMTKTSVDCTMYICGDSTECSNLLLQYGSFCTQLNRALTGIAVEQDKNTQEVFAQVKQIYKTPPIKDFGGFNFSQILPDPSKPSKRSFIEDLLFNKVTLADAGFIKQYGDCLGDIAARDLICAQKFNGLTVLPPLLTDEMIAQYTSALLAGTITSGWTFGAGAALQIPFAMQMAYRFNGIGVTQNVLYENQKLIANQFNSAIGKIQDSLSSTASALGKLQDVVNQNAQALNTLVKQLSSNFGAISSVLNDILSRLDPPEAEVQIDRLITGRLQSLQTYVTQQLIRAAEIRASANLAATKMSECVLGQSKRVDFCGKGYHLMSFPQSAPHGVVFLHVTYVPAQEKNFTTAPAICHDGKAHFPREGVFVSNGTHWFVTQRNFYEPQIITTDNTFVSGNCDVVIGIVNNTVYDPLQPELDSFKEELDKYFKNHTSPDVDLGDISGINASVVNIQKEIDRLNEVAKNLNESLIDLQELGKYEQYIKGSGRENLYFQGGGGSGYIPEAPRDGQAYVRKDGEWVLLSTFLGHHHHHHHH

SEQ ID NO: 5640 - protein, 1281 aa, Artificial Sequence
  Description of Artificial Sequence: Synthetic polypeptide
MGILPSPGMPALLSLVSLLSVLLMGCVAETGTQCVNLTTRTQLPPAYTNSFTRGVYYPDKVFRSSVLHSTQDLFLPFFSNVTWFHAIHVSGTNGTKRFDNPVLPFNDGVYFASTEKSNIIRGWIFGTTLDSKTQSLLIVNNATNVVIKVCEFQFCNDPFLGVYYHKNNKSWMESEFRVYSSANNCTFEYVSQPFLMDLEGKQGNFKNLREFVFKNIDGYFKIYSKHTPINLVRDLPQGFSALEPLVDLPIGINITRFQTLLALHRSYLTPGDSSSGWTAGAAAYYVGYLQPRTFLLKYNENGTITDAVDCALDPLSETKCTLKSFTVEKGIYQTSNFRVQPTESIVRFPNITNLCPFGEVFNATRFASVYAWNRKRISNCVADYSVLYNSASFSTFKCYGVSPTKLNDLCFTNVYADSFVIRGDEVRQIAPGQTGKIADYNYKLPDDFTGCVIAWNSNNLDSKVGGNYNYLYRLFRKSNLKPFERDISTSIYQAGSTPCNGVEGFNCYFPLQSYGFQPTNGVGYQPYRVVVLSFELLHAPATVCGPKKSTNLVKNKCVNFNFNGLTGTGVLTESNKKFLPFQQFGRDIADTTDAVRDPQTLEILDITPCSFGGVSVITPGTNTSNQVAVLYQDVNCTEVPVAIHADQLTPTWRVYSTGSNVFQTRAGCLIGAEHVNNSYECDIPIGAGICASYQTQTNSPSGAGSVASQSIIAYTMSLGAENSVAYSNNSIAIPTNFTISVTTEILPVSMTKTSVDCTMYICGDSTECSNLLLQYGSFCTQLNRALTGIAVEQDKNTQEVFAQVKQIYKTPPIKDFGGFNFSQILPDPSKPSKRSFIEDLLFNKVTLADAGFIKQYGDCLGDIAARDLICAQKFNGLTVLPPLLTDEMIAQYTSALLAGTITSGWTFGAGAALQIPFAMQMAYRFNGIGVTQNVLYENQKLIANQFNSAIGKIQDSLSSTASALGKLQDVVNQNAQALNTLVKQLSSNFGAISSVLNDILSRLDPPEAEVQIDRLITGRLQSLQTYVTQQLIRAAEIRASANLAATKMSECVLGQSKRVDFCGKGYHLMSFPQSAPHGVVFLHVTYVPAQEKNFTTAPAICHDGKAHFPREGVFVSNGTHWFVTQRNFYEPQIITTDNTFVSGNCDVVIGIVNNTVYDPLQPELDSFKEELDKYFKNHTSPDVDLGDISGINASVVNIQKEIDRLNEVAKNLNESLIDLQELGKYEQYIKGSGRENLYFQGGGGSGYIPEAPRDGQAYVRKDGEWVLLSTFLGHHHHHHHH

SEQ ID NO: 5641 - protein, 1281 aa, Artificial Sequence
  Description of Artificial Sequence: Synthetic polypeptide
MGILPSPGMPALLSLVSLLSVLLMGCVAETGTQCVNLTTRTQLPPAYTNSFTRGVYYPDKVFRSSVLHSTQDLFLPFFSNVTWFHAIHVSGTNGTKRFDNPVLPFNDGVYFASTEKSNIIRGWIFGTTLDSKTQSLLIVNNATNVVIKVCEFQFCNDPFLGVYYHKNNKSWMESEFRVYSSANNCTFEYVSQPFLMDLEGKQGNFKNLREFVFKNIDGYFKIYSKHTPINLVRDLPQGFSALEPLVDLPIGINITRFQTLLALHRSYLTPGDSSSGWTAGAAAYYVGYLQPRTFLLKYNENGTITDAVDCALDPLSETKCTLKSFTVEKGIYQTSNFRVQPTESIVRFPNITNLCPFGEVFNATRFASVYAWNRKRISNCVADYSVLYNSASFSTFKCYGVSPTKLNDLCFTNVYADSFVIRGDEVRQIAPGQTGKIADYNYKLPDDFTGCVIAWNSNNLDSKVGGNYNYLYRLFRKSNLKPFERDISTESYQAGSTPCNGVEGFNCYFPLQSYGFQPTNGVGYQPYRVVVLSFELLHAPATVCGPKKSTNLVKNKCVNFNFNGLTGTGVLTESNKKFLPFQQFGRDIADTTDAVRDPQTLEILDITPCSFGGVSVITPGTNTSNQVAVLYQDVNCTEVPVAIHADQLTPTWRVYSTGSNVFQTRAGCLIGAEHVNNSYECDIPIGAGICASYQTQTNSPSGAGSVASQSIIAYTMSLGAENSVAYSNNSIAIPTNFTISVTTEILPVSMTKTSVDCTMYICGDSTECSNLLLQYGSFCTQLNRALTGIAVEQDKNTQEVFAQVKQIYKTPPIKDFGGFNFSQILPDPSKPSKRSFIEDLLFNKVTLADAGFIKQYGDCLGDIAARDLICAQKFNGLTVLPPLLTDEMIAQYTSALLAGTITSGWTFGAGAALQIPFAMQMAYRFNGIGVTQNVLYENQKLIANQFNSAIGKIQDSLSSTASALGKLQDVVNQNAQALNTLVKQLSSNFGAISSVLNDILSRLDPPEAEVQIDRLITGRLQSLQTYVTQQLIRAAEIRASANLAATKMSECVLGQSKRVDFCGKGYHLMSFPQSAPHGVVFLHVTYVPAQEKNFTTAPAICHDGKAHFPREGVFVSNGTHWFVTQRNFYEPQIITTDNTFVSGNCDVVIGIVNNTVYDPLQPELDSFKEELDKYFKNHTSPDVDLGDISGINASVVNIQKEIDRLNEVAKNLNESLIDLQELGKYEQYIKGSGRENLYFQGGGGSGYIPEAPRDGQAYVRKDGEWVLLSTFLGHHHHHHHH

SEQ ID NO: 5642 - protein, 1281 aa, Artificial Sequence
  Description of Artificial Sequence: Synthetic polypeptide
MGILPSPGMPALLSLVSLLSVLLMGCVAETGTQCVNLTTRTQLPPAYTNSFTRGVYYPDKVFRSSVLHSTQDLFLPFFSNVTWFHAIHVSGTNGTKRFDNPVLPFNDGVYFASTEKSNIIRGWIFGTTLDSKTQSLLIVNNATNVVIKVCEFQFCNDPFLGVYYHKNNKSWMESEFRVYSSANNCTFEYVSQPFLMDLEGKQGNFKNLREFVFKNIDGYFKIYSKHTPINLVRDLPQGFSALEPLVDLPIGINITRFQTLLALHRSYLTPGDSSSGWTAGAAAYYVGYLQPRTFLLKYNENGTITDAVDCALDPLSETKCTLKSFTVEKGIYQTSNFRVQPTESIVRFPNITNLCPFGEVFNATRFASVYAWNRKRISNCVADYSVLYNSASFSTFKCYGVSPTKLNDLCFTNVYADSFVIRGDEVRQIAPGQTGKIADYNYKLPDDFTGCVIAWNSNNLDSKVGGNYNYLYRLFRKSNLKPFERDISTEIYQAGSTPCNGVEGFNCYFPLQSYGFQPTNGVGYQPYRVVVLSFELLWAPATVCGPKKSTNLVKNKCVNFNFNGLTGTGVLTESNKKFLPFQQFGRDIADTTDAVRDPQTLEILDITPCSFGGVSVITPGTNTSNQVAVLYQDVNCTEVPVAIHADQLTPTWRVYSTGSNVFQTRAGCLIGAEHVNNSYECDIPIGAGICASYQTQTNSPSGAGSVASQSIIAYTMSLGAENSVAYSNNSIAIPTNFTISVTTEILPVSMTKTSVDCTMYICGDSTECSNLLLQYGSFCTQLNRALTGIAVEQDKNTQEVFAQVKQIYKTPPIKDFGGFNFSQILPDPSKPSKRSFIEDLLFNKVTLADAGFIKQYGDCLGDIAARDLICAQKFNGLTVLPPLLTDEMIAQYTSALLAGTITSGWTFGAGAALQIPFAMQMAYRFNGIGVTQNVLYENQKLIANQFNSAIGKIQDSLSSTASALGKLQDVVNQNAQALNTLVKQLSSNFGAISSVLNDILSRLDPPEAEVQIDRLITGRLQSLQTYVTQQLIRAAEIRASANLAATKMSECVLGQSKRVDFCGKGYHLMSFPQSAPHGVVFLHVTYVPAQEKNFTTAPAICHDGKAHFPREGVFVSNGTHWFVTQRNFYEPQIITTDNTFVSGNCDVVIGIVNNTVYDPLQPELDSFKEELDKYFKNHTSPDVDLGDISGINASVVNIQKEIDRLNEVAKNLNESLIDLQELGKYEQYIKGSGRENLYFQGGGGSGYIPEAPRDGQAYVRKDGEWVLLSTFLGHHHHHHHH

SEQ ID NO: 5643 - protein, 1281 aa, Artificial Sequence
  Description of Artificial Sequence: Synthetic polypeptide
MGILPSPGMPALLSLVSLLSVLLMGCVAETGTQCVNLTTRTQLPPAYTNSFTRGVYYPDKVFRSSVLHSTQDLFLPFFSNVTWFHAIHVSGTNGTKRFDNPVLPFNDGVYFASTEKSNIIRGWIFGTTLDSKTQSLLIVNNATNVVIKVCEFQFCNDPFLGVYYHKNNKSWMESEFRVYSSANNCTFEYVSQPFLMDLEGKQGNFKNLREFVFKNIDGYFKIYSKHTPINLVRDLPQGFSALEPLVDLPIGINITRFQTLLALHRSYLTPGDSSSGWTAGAAAYYVGYLQPRTFLLKYNENGTITDAVDCALDPLSETKCTLKSFTVEKGIYQTSNFRVQPTESIVRFPNITNLCPFGEVFNATRFASVYAWNRKRISNCVADYSVLYNSASFSTFKCYGVSPTKLNDLCFTNVYADSFVIRGDEVRQIAPGQTGKIADYNYKLPDDFTGCVIAWNSNNLDSKVGGNYNYLYRLFRKSNLKPFERYISTEIYQAGSTPCNGVEGFNCYFPLQSYGFQPTNGVGYQPYRVVVLSFELLHAPATVCGPKKSTNLVKNKCVNFNFNGLTGTGVLTESNKKFLPFQQFGRDIADTTDAVRDPQTLEILDITPCSFGGVSVITPGTNTSNQVAVLYQDVNCTEVPVAIHADQLTPTWRVYSTGSNVFQTRAGCLIGAEHVNNSYECDIPIGAGICASYQTQTNSPSGAGSVASQSIIAYTMSLGAENSVAYSNNSIAIPTNFTISVTTEILPVSMTKTSVDCTMYICGDSTECSNLLLQYGSFCTQLNRALTGIAVEQDKNTQEVFAQVKQIYKTPPIKDFGGFNFSQILPDPSKPSKRSFIEDLLFNKVTLADAGFIKQYGDCLGDIAARDLICAQKFNGLTVLPPLLTDEMIAQYTSALLAGTITSGWTFGAGAALQIPFAMQMAYRFNGIGVTQNVLYENQKLIANQFNSAIGKIQDSLSSTASALGKLQDVVNQNAQALNTLVKQLSSNFGAISSVLNDILSRLDPPEAEVQIDRLITGRLQSLQTYVTQQLIRAAEIRASANLAATKMSECVLGQSKRVDFCGKGYHLMSFPQSAPHGVVFLHVTYVPAQEKNFTTAPAICHDGKAHFPREGVFVSNGTHWFVTQRNFYEPQIITTDNTFVSGNCDVVIGIVNNTVYDPLQPELDSFKEELDKYFKNHTSPDVDLGDISGINASVVNIQKEIDRLNEVAKNLNESLIDLQELGKYEQYIKGSGRENLYFQGGGGSGYIPEAPRDGQAYVRKDGEWVLLSTFLGHHHHHHHH

SEQ ID NO: 5644 - protein, 1281 aa, Artificial Sequence
  Description of Artificial Sequence: Synthetic polypeptide
MGILPSPGMPALLSLVSLLSVLLMGCVAETGTQCVNLTTRTQLPPAYTNSFTRGVYYPDKVFRSSVLHSTQDLFLPFFSNVTWFHAIHVSGTNGTKRFDNPVLPFNDGVYFASTEKSNIIRGWIFGTTLDSKTQSLLIVNNATNVVIKVCEFQFCNDPFLGVYYHKNNKSWMESEFRVYSSANNCTFEYVSQPFLMDLEGKQGNFKNLREFVFKNIDGYFKIYSKHTPINLVRDLPQGFSALEPLVDLPIGINITRFQTLLALHRSYLTPGDSSSGWTAGAAAYYVGYLQPRTFLLKYNENGTITDAVDCALDPLSETKCTLKSFTVEKGIYQTSNFRVQPTESIVRFPNITNLCPFGEVFNATRFASVYAWNRKRISNCVADYSVLYNSASFSTFKCYGVSPTKLNDLCFTNVYADSFVIRGDEVRQIAPGQTGKIADYNYKLPDDFTGCVIAWNSNNLDSKVGGNYNYLYRLFRKSNLKPFERDISYEIYQAGSTPCNGVEGFNCYFPLQSYGFQPTNGVGYQPYRVVVLSFELLHAPATVCGPKKSTNLVKNKCVNFNFNGLTGTGVLTESNKKFLPFQQFGRDIADTTDAVRDPQTLEILDITPCSFGGVSVITPGTNTSNQVAVLYQDVNCTEVPVAIHADQLTPTWRVYSTGSNVFQTRAGCLIGAEHVNNSYECDIPIGAGICASYQTQTNSPSGAGSVASQSIIAYTMSLGAENSVAYSNNSIAIPTNFTISVTTEILPVSMTKTSVDCTMYICGDSTECSNLLLQYGSFCTQLNRALTGIAVEQDKNTQEVFAQVKQIYKTPPIKDFGGFNFSQILPDPSKPSKRSFIEDLLFNKVTLADAGFIKQYGDCLGDIAARDLICAQKFNGLTVLPPLLTDEMIAQYTSALLAGTITSGWTFGAGAALQIPFAMQMAYRFNGIGVTQNVLYENQKLIANQFNSAIGKIQDSLSSTASALGKLQDVVNQNAQALNTLVKQLSSNFGAISSVLNDILSRLDPPEAEVQIDRLITGRLQSLQTYVTQQLIRAAEIRASANLAATKMSECVLGQSKRVDFCGKGYHLMSFPQSAPHGVVFLHVTYVPAQEKNFTTAPAICHDGKAHFPREGVFVSNGTHWFVTQRNFYEPQIITTDNTFVSGNCDVVIGIVNNTVYDPLQPELDSFKEELDKYFKNHTSPDVDLGDISGINASVVNIQKEIDRLNEVAKNLNESLIDLQELGKYEQYIKGSGRENLYFQGGGGSGYIPEAPRDGQAYVRKDGEWVLLSTFLGHHHHHHHH

SEQ ID NO: 5645 - protein, 1281 aa, Artificial Sequence
  Description of Artificial Sequence: Synthetic polypeptide
MGILPSPGMPALLSLVSLLSVLLMGCVAETGTQCVNLTTRTQLPPAYTNSFTRGVYYPDKVFRSSVLHSTQDLFLPFFSNVTWFHAIHVSGTNGTKRFDNPVLPFNDGVYFASTEKSNIIRGWIFGTTLDSKTQSLLIVNNATNVVIKVCEFQFCNDPFLGVYYHKNNKSWMESEFRVYSSANNCTFEYVSQPFLMDLEGKQGNFKNLREFVFKNIDGYFKIYSKHTPINLVRDLPQGFSALEPLVDLPIGINITRFQTLLALHRSYLTPGDSSSGWTAGAAAYYVGYLQPRTFLLKYNENGTITDAVDCALDPLSETKCTLKSFTVEKGIYQTSNFRVQPTESIVRFPNITNLCPFGEVFNATRFASVYAWNRKRISNCVADYSVLYNSASFSTFKCYGVSPTKLNDLCFTNVYADSFVIRGDEVRQIAPGQTGKIADYNYKLPDDFTGCVIAWNSNNLDSKVGGNYNYLYRLFRKSNLKPFERDISTEIYQAGSTPCNGVEGFNCYFPLQSYGFQPTNGVGYQPYRVVVLSFELVHAPATVCGPKKSTNLVKNKCVNFNFNGLTGTGVLTESNKKFLPFQQFGRDIADTTDAVRDPQTLEILDITPCSFGGVSVITPGTNTSNQVAVLYQDVNCTEVPVAIHADQLTPTWRVYSTGSNVFQTRAGCLIGAEHVNNSYECDIPIGAGICASYQTQTNSPSGAGSVASQSIIAYTMSLGAENSVAYSNNSIAIPTNFTISVTTEILPVSMTKTSVDCTMYICGDSTECSNLLLQYGSFCTQLNRALTGIAVEQDKNTQEVFAQVKQIYKTPPIKDFGGFNFSQILPDPSKPSKRSFIEDLLFNKVTLADAGFIKQYGDCLGDIAARDLICAQKFNGLTVLPPLLTDEMIAQYTSALLAGTITSGWTFGAGAALQIPFAMQMAYRFNGIGVTQNVLYENQKLIANQFNSAIGKIQDSLSSTASALGKLQDVVNQNAQALNTLVKQLSSNFGAISSVLNDILSRLDPPEAEVQIDRLITGRLQSLQTYVTQQLIRAAEIRASANLAATKMSECVLGQSKRVDFCGKGYHLMSFPQSAPHGVVFLHVTYVPAQEKNFTTAPAICHDGKAHFPREGVFVSNGTHWFVTQRNFYEPQIITTDNTFVSGNCDVVIGIVNNTVYDPLQPELDSFKEELDKYFKNHTSPDVDLGDISGINASVVNIQKEIDRLNEVAKNLNESLIDLQELGKYEQYIKGSGRENLYFQGGGGSGYIPEAPRDGQAYVRKDGEWVLLSTFLGHHHHHHHH

SEQ ID NO: 5646 - protein, 1281 aa, Artificial Sequence
  Description of Artificial Sequence: Synthetic polypeptide
MGILPSPGMPALLSLVSLLSVLLMGCVAETGTQCVNLTTRTQLPPAYTNSFTRGVYYPDKVFRSSVLHSTQDLFLPFFSNVTWFHAIHVSGTNGTKRFDNPVLPFNDGVYFASTEKSNIIRGWIFGTTLDSKTQSLLIVNNATNVVIKVCEFQFCNDPFLGVYYHKNNKSWMESEFRVYSSANNCTFEYVSQPFLMDLEGKQGNFKNLREFVFKNIDGYFKIYSKHTPINLVRDLPQGFSALEPLVDLPIGINITRFQTLLALHRSYLTPGDSSSGWTAGAAAYYVGYLQPRTFLLKYNENGTITDAVDCALDPLSETKCTLKSFTVEKGIYQTSNFRVQPTESIVRFPNITNLCPFGEVFNATRFASVYAWNRKRISNCVADYSVLYNSASFSTFKCYGVSPTKLNDLCFTNVYADSFVIRGDEVRQIAPGQTGKIADYNYKLPDDFTGCVIAWNSNNLDSKVGGNYNYLYRLFRKSNLKPFERNISTEIYQAGSTPCNGVEGFNCYFPLQSYGFQPTNGVGYQPYRVVVLSFELLHAPATVCGPKKSTNLVKNKCVNFNFNGLTGTGVLTESNKKFLPFQQFGRDIADTTDAVRDPQTLEILDITPCSFGGVSVITPGTNTSNQVAVLYQDVNCTEVPVAIHADQLTPTWRVYSTGSNVFQTRAGCLIGAEHVNNSYECDIPIGAGICASYQTQTNSPSGAGSVASQSIIAYTMSLGAENSVAYSNNSIAIPTNFTISVTTEILPVSMTKTSVDCTMYICGDSTECSNLLLQYGSFCTQLNRALTGIAVEQDKNTQEVFAQVKQIYKTPPIKDFGGFNFSQILPDPSKPSKRSFIEDLLFNKVTLADAGFIKQYGDCLGDIAARDLICAQKFNGLTVLPPLLTDEMIAQYTSALLAGTITSGWTFGAGAALQIPFAMQMAYRFNGIGVTQNVLYENQKLIANQFNSAIGKIQDSLSSTASALGKLQDVVNQNAQALNTLVKQLSSNFGAISSVLNDILSRLDPPEAEVQIDRLITGRLQSLQTYVTQQLIRAAEIRASANLAATKMSECVLGQSKRVDFCGKGYHLMSFPQSAPHGVVFLHVTYVPAQEKNFTTAPAICHDGKAHFPREGVFVSNGTHWFVTQRNFYEPQIITTDNTFVSGNCDVVIGIVNNTVYDPLQPELDSFKEELDKYFKNHTSPDVDLGDISGINASVVNIQKEIDRLNEVAKNLNESLIDLQELGKYEQYIKGSGRENLYFQGGGGSGYIPEAPRDGQAYVRKDGEWVLLSTFLGHHHHHHHH

SEQ ID NO: 5647 - protein, 1281 aa, Artificial Sequence
  Description of Artificial Sequence: Synthetic polypeptide
MGILPSPGMPALLSLVSLLSVLLMGCVAETGTQCVNLTTRTQLPPAYTNSFTRGVYYPDKVFRSSVLHSTQDLFLPFFSNVTWFHAIHVSGTNGTKRFDNPVLPFNDGVYFASTEKSNIIRGWIFGTTLDSKTQSLLIVNNATNVVIKVCEFQFCNDPFLGVYYHKNNKSWMESEFRVYSSANNCTFEYVSQPFLMDLEGKQGNFKNLREFVFKNIDGYFKIYSKHTPINLVRDLPQGFSALEPLVDLPIGINITRFQTLLALHRSYLTPGDSSSGWTAGAAAYYVGYLQPRTFLLKYNENGTITDAVDCALDPLSETKCTLKSFTVEKGIYQTSNFRVQPTESIVRFPNITNLCPFGEVFNATRFASVYAWNRKRISNCVADYSVLYNSASFSTFKCYGVSPTKLNDLCFTNVYADSFVIRGDEVRQIAPGQTGKIADYNYKLPDDFTGCVIAWNSNNLDSKVGGNYNYLYRLFRKSNLKPFERDISTTIYQAGSTPCNGVEGFNCYFPLQSYGFQPTNGVGYQPYRVVVLSFELLHAPATVCGPKKSTNLVKNKCVNFNFNGLTGTGVLTESNKKFLPFQQFGRDIADTTDAVRDPQTLEILDITPCSFGGVSVITPGTNTSNQVAVLYQDVNCTEVPVAIHADQLTPTWRVYSTGSNVFQTRAGCLIGAEHVNNSYECDIPIGAGICASYQTQTNSPSGAGSVASQSIIAYTMSLGAENSVAYSNNSIAIPTNFTISVTTEILPVSMTKTSVDCTMYICGDSTECSNLLLQYGSFCTQLNRALTGIAVEQDKNTQEVFAQVKQIYKTPPIKDFGGFNFSQILPDPSKPSKRSFIEDLLFNKVTLADAGFIKQYGDCLGDIAARDLICAQKFNGLTVLPPLLTDEMIAQYTSALLAGTITSGWTFGAGAALQIPFAMQMAYRFNGIGVTQNVLYENQKLIANQFNSAIGKIQDSLSSTASALGKLQDVVNQNAQALNTLVKQLSSNFGAISSVLNDILSRLDPPEAEVQIDRLITGRLQSLQTYVTQQLIRAAEIRASANLAATKMSECVLGQSKRVDFCGKGYHLMSFPQSAPHGVVFLHVTYVPAQEKNFTTAPAICHDGKAHFPREGVFVSNGTHWFVTQRNFYEPQIITTDNTFVSGNCDVVIGIVNNTVYDPLQPELDSFKEELDKYFKNHTSPDVDLGDISGINASVVNIQKEIDRLNEVAKNLNESLIDLQELGKYEQYIKGSGRENLYFQGGGGSGYIPEAPRDGQAYVRKDGEWVLLSTFLGHHHHHHHH

SEQ ID NO: 5648 - protein, 1281 aa, Artificial Sequence
  Description of Artificial Sequence: Synthetic polypeptide
MGILPSPGMPALLSLVSLLSVLLMGCVAETGTQCVNLTTRTQLPPAYTNSFTRGVYYPDKVFRSSVLHSTQDLFLPFFSNVTWFHAIHVSGTNGTKRFDNPVLPFNDGVYFASTEKSNIIRGWIFGTTLDSKTQSLLIVNNATNVVIKVCEFQFCNDPFLGVYYHKNNKSWMESEFRVYSSANNCTFEYVSQPFLMDLEGKQGNFKNLREFVFKNIDGYFKIYSKHTPINLVRDLPQGFSALEPLVDLPIGINITRFQTLLALHRSYLTPGDSSSGWTAGAAAYYVGYLQPRTFLLKYNENGTITDAVDCALDPLSETKCTLKSFTVEKGIYQTSNFRVQPTESIVRFPNITNLCPFGEVFNATRFASVYAWNRKRISNCVADYSVLYNSASFSTFKCYGVSPTKLNDLCFTNVYADSFVIRGDEVRQIAPGQTGKIADYNYKLPDDFTGCVIAWNSNNLDSKVGGNYNYLYRLFRKSNLKPFERDISTEIYQAGSTPCNGVEGFNCYFPLQSYGFQPTNGVGYQPYRVVVLFFELLHAPATVCGPKKSTNLVKNKCVNFNFNGLTGTGVLTESNKKFLPFQQFGRDIADTTDAVRDPQTLEILDITPCSFGGVSVITPGTNTSNQVAVLYQDVNCTEVPVAIHADQLTPTWRVYSTGSNVFQTRAGCLIGAEHVNNSYECDIPIGAGICASYQTQTNSPSGAGSVASQSIIAYTMSLGAENSVAYSNNSIAIPTNFTISVTTEILPVSMTKTSVDCTMYICGDSTECSNLLLQYGSFCTQLNRALTGIAVEQDKNTQEVFAQVKQIYKTPPIKDFGGFNFSQILPDPSKPSKRSFIEDLLFNKVTLADAGFIKQYGDCLGDIAARDLICAQKFNGLTVLPPLLTDEMIAQYTSALLAGTITSGWTFGAGAALQIPFAMQMAYRFNGIGVTQNVLYENQKLIANQFNSAIGKIQDSLSSTASALGKLQDVVNQNAQALNTLVKQLSSNFGAISSVLNDILSRLDPPEAEVQIDRLITGRLQSLQTYVTQQLIRAAEIRASANLAATKMSECVLGQSKRVDFCGKGYHLMSFPQSAPHGVVFLHVTYVPAQEKNFTTAPAICHDGKAHFPREGVFVSNGTHWFVTQRNFYEPQIITTDNTFVSGNCDVVIGIVNNTVYDPLQPELDSFKEELDKYFKNHTSPDVDLGDISGINASVVNIQKEIDRLNEVAKNLNESLIDLQELGKYEQYIKGSGRENLYFQGGGGSGYIPEAPRDGQAYVRKDGEWVLLSTFLGHHHHHHHH

SEQ ID NO: 5649 - protein, 1281 aa, Artificial Sequence
  Description of Artificial Sequence: Synthetic polypeptide
MGILPSPGMPALLSLVSLLSVLLMGCVAETGTQCVNLTTRTQLPPAYTNSFTRGVYYPDKVFRSSVLHSTQDLFLPFFSNVTWFHAIHVSGTNGTKRFDNPVLPFNDGVYFASTEKSNIIRGWIFGTTLDSKTQSLLIVNNATNVVIKVCEFQFCNDPFLGVYYHKNNKSWMESEFRVYSSANNCTFEYVSQPFLMDLEGKQGNFKNLREFVFKNIDGYFKIYSKHTPINLVRDLPQGFSALEPLVDLPIGINITRFQTLLALHRSYLTPGDSSSGWTAGAAAYYVGYLQPRTFLLKYNENGTITDAVDCALDPLSETKCTLKSFTVEKGIYQTSNFRVQPTESIVRFPNITNLCPFGEVFNATRFASVYAWNRKRISNCVADYSVLYNSASFSTFKCYGVSPTKLNDLCFTNVYADSFVIRGDEVRQIAPGQTGKIADYNYKLPDDFTGCVIAWNSNNLDSKVGGNYNYLYRLFRKSNLKPFERDISTEIYQAGSTPCNGVEGFNCYFPLQSYGFQPTNGVGYQPYRVVVLSFELLNAPATVCGPKKSTNLVKNKCVNFNFNGLTGTGVLTESNKKFLPFQQFGRDIADTTDAVRDPQTLEILDITPCSFGGVSVITPGTNTSNQVAVLYQDVNCTEVPVAIHADQLTPTWRVYSTGSNVFQTRAGCLIGAEHVNNSYECDIPIGAGICASYQTQTNSPSGAGSVASQSIIAYTMSLGAENSVAYSNNSIAIPTNFTISVTTEILPVSMTKTSVDCTMYICGDSTECSNLLLQYGSFCTQLNRALTGIAVEQDKNTQEVFAQVKQIYKTPPIKDFGGFNFSQILPDPSKPSKRSFIEDLLFNKVTLADAGFIKQYGDCLGDIAARDLICAQKFNGLTVLPPLLTDEMIAQYTSALLAGTITSGWTFGAGAALQIPFAMQMAYRFNGIGVTQNVLYENQKLIANQFNSAIGKIQDSLSSTASALGKLQDVVNQNAQALNTLVKQLSSNFGAISSVLNDILSRLDPPEAEVQIDRLITGRLQSLQTYVTQQLIRAAEIRASANLAATKMSECVLGQSKRVDFCGKGYHLMSFPQSAPHGVVFLHVTYVPAQEKNFTTAPAICHDGKAHFPREGVFVSNGTHWFVTQRNFYEPQIITTDNTFVSGNCDVVIGIVNNTVYDPLQPELDSFKEELDKYFKNHTSPDVDLGDISGINASVVNIQKEIDRLNEVAKNLNESLIDLQELGKYEQYIKGSGRENLYFQGGGGSGYIPEAPRDGQAYVRKDGEWVLLSTFLGHHHHHHHH

SEQ ID NO: 5650 - protein, 1281 aa, Artificial Sequence
  Description of Artificial Sequence: Synthetic polypeptide
MGILPSPGMPALLSLVSLLSVLLMGCVAETGTQCVNLTTRTQLPPAYTNSFTRGVYYPDKVFRSSVLHSTQDLFLPFFSNVTWFHAIHVSGTNGTKRFDNPVLPFNDGVYFASTEKSNIIRGWIFGTTLDSKTQSLLIVNNATNVVIKVCEFQFCNDPFLGVYYHKNNKSWMESEFRVYSSANNCTFEYVSQPFLMDLEGKQGNFKNLREFVFKNIDGYFKIYSKHTPINLVRDLPQGFSALEPLVDLPIGINITRFQTLLALHRSYLTPGDSSSGWTAGAAAYYVGYLQPRTFLLKYNENGTITDAVDCALDPLSETKCTLKSFTVEKGIYQTSNFRVQPTESIVRFPNITNLCPFGEVFNATRFASVYAWNRKRISNCVADYSVLYNSASFSTFKCYGVSPTKLNDLCFTNVYADSFVIRGDEVRQIAPGQTGKIADYNYKLPDDFTGCVIAWNSNNLDSKVGGNYNYLYRLFRKSNLKPFESDISTEIYQAGSTPCNGVEGFNCYFPLQSYGFQPTNGVGYQPYRVVVLSFELLHAPATVCGPKKSTNLVKNKCVNFNFNGLTGTGVLTESNKKFLPFQQFGRDIADTTDAVRDPQTLEILDITPCSFGGVSVITPGTNTSNQVAVLYQDVNCTEVPVAIHADQLTPTWRVYSTGSNVFQTRAGCLIGAEHVNNSYECDIPIGAGICASYQTQTNSPSGAGSVASQSIIAYTMSLGAENSVAYSNNSIAIPTNFTISVTTEILPVSMTKTSVDCTMYICGDSTECSNLLLQYGSFCTQLNRALTGIAVEQDKNTQEVFAQVKQIYKTPPIKDFGGFNFSQILPDPSKPSKRSFIEDLLFNKVTLADAGFIKQYGDCLGDIAARDLICAQKFNGLTVLPPLLTDEMIAQYTSALLAGTITSGWTFGAGAALQIPFAMQMAYRFNGIGVTQNVLYENQKLIANQFNSAIGKIQDSLSSTASALGKLQDVVNQNAQALNTLVKQLSSNFGAISSVLNDILSRLDPPEAEVQIDRLITGRLQSLQTYVTQQLIRAAEIRASANLAATKMSECVLGQSKRVDFCGKGYHLMSFPQSAPHGVVFLHVTYVPAQEKNFTTAPAICHDGKAHFPREGVFVSNGTHWFVTQRNFYEPQIITTDNTFVSGNCDVVIGIVNNTVYDPLQPELDSFKEELDKYFKNHTSPDVDLGDISGINASVVNIQKEIDRLNEVAKNLNESLIDLQELGKYEQYIKGSGRENLYFQGGGGSGYIPEAPRDGQAYVRKDGEWVLLSTFLGHHHHHHHH

SEQ ID NO: 5651 - protein, 1281 aa, Artificial Sequence
  Description of Artificial Sequence: Synthetic polypeptide
MGILPSPGMPALLSLVSLLSVLLMGCVAETGTQCVNLTTRTQLPPAYTNSFTRGVYYPDKVFRSSVLHSTQDLFLPFFSNVTWFHAIHVSGTNGTKRFDNPVLPFNDGVYFASTEKSNIIRGWIFGTTLDSKTQSLLIVNNATNVVIKVCEFQFCNDPFLGVYYHKNNKSWMESEFRVYSSANNCTFEYVSQPFLMDLEGKQGNFKNLREFVFKNIDGYFKIYSKHTPINLVRDLPQGFSALEPLVDLPIGINITRFQTLLALHRSYLTPGDSSSGWTAGAAAYYVGYLQPRTFLLKYNENGTITDAVDCALDPLSETKCTLKSFTVEKGIYQTSNFRVQPTESIVRFPNITNLCPFGEVFNATRFASVYAWNRKRISNCVADYSVLYNSASFSTFKCYGVSPTKLNDLCFTNVYADSFVIRGDEVRQIAPGQTGKIADYNYKLPDDFTGCVIAWNSNNLDSKVGGNYNYLYRLFRKSNLKPFERDISTEIYQAGSTVCNGVEGFNCYFPLQSYGFQPTNGVGYQPYRVVVLSFELLHAPATVCGPKKSTNLVKNKCVNFNFNGLTGTGVLTESNKKFLPFQQFGRDIADTTDAVRDPQTLEILDITPCSFGGVSVITPGTNTSNQVAVLYQDVNCTEVPVAIHADQLTPTWRVYSTGSNVFQTRAGCLIGAEHVNNSYECDIPIGAGICASYQTQTNSPSGAGSVASQSIIAYTMSLGAENSVAYSNNSIAIPTNFTISVTTEILPVSMTKTSVDCTMYICGDSTECSNLLLQYGSFCTQLNRALTGIAVEQDKNTQEVFAQVKQIYKTPPIKDFGGFNFSQILPDPSKPSKRSFIEDLLFNKVTLADAGFIKQYGDCLGDIAARDLICAQKFNGLTVLPPLLTDEMIAQYTSALLAGTITSGWTFGAGAALQIPFAMQMAYRFNGIGVTQNVLYENQKLIANQFNSAIGKIQDSLSSTASALGKLQDVVNQNAQALNTLVKQLSSNFGAISSVLNDILSRLDPPEAEVQIDRLITGRLQSLQTYVTQQLIRAAEIRASANLAATKMSECVLGQSKRVDFCGKGYHLMSFPQSAPHGVVFLHVTYVPAQEKNFTTAPAICHDGKAHFPREGVFVSNGTHWFVTQRNFYEPQIITTDNTFVSGNCDVVIGIVNNTVYDPLQPELDSFKEELDKYFKNHTSPDVDLGDISGINASVVNIQKEIDRLNEVAKNLNESLIDLQELGKYEQYIKGSGRENLYFQGGGGSGYIPEAPRDGQAYVRKDGEWVLLSTFLGHHHHHHHH

SEQ ID NO: 5652 - protein, 1281 aa, Artificial Sequence
  Description of Artificial Sequence: Synthetic polypeptide
MGILPSPGMPALLSLVSLLSVLLMGCVAETGTQCVNLTTRTQLPPAYTNSFTRGVYYPDKVFRSSVLHSTQDLFLPFFSNVTWFHAIHVSGTNGTKRFDNPVLPFNDGVYFASTEKSNIIRGWIFGTTLDSKTQSLLIVNNATNVVIKVCEFQFCNDPFLGVYYHKNNKSWMESEFRVYSSANNCTFEYVSQPFLMDLEGKQGNFKNLREFVFKNIDGYFKIYSKHTPINLVRDLPQGFSALEPLVDLPIGINITRFQTLLALHRSYLTPGDSSSGWTAGAAAYYVGYLQPRTFLLKYNENGTITDAVDCALDPLSETKCTLKSFTVEKGIYQTSNFRVQPTESIVRFPNITNLCPFGEVFNATRFASVYAWNRKRISNCVADYSVLYNSASFSTFKCYGVSPTKLNDLCFTNVYADSFVIRGDEVRQIAPGQTGKIADYNYKLPDDFTGCVIAWNSNNLDSKVGGNYNYLYRLFRKSNLKPFERDISTCIYQAGSTPCNGVEGFNCYFPLQSYGFQPTNGVGYQPYRVVVLSFELLHAPATVCGPKKSTNLVKNKCVNFNFNGLTGTGVLTESNKKFLPFQQFGRDIADTTDAVRDPQTLEILDITPCSFGGVSVITPGTNTSNQVAVLYQDVNCTEVPVAIHADQLTPTWRVYSTGSNVFQTRAGCLIGAEHVNNSYECDIPIGAGICASYQTQTNSPSGAGSVASQSIIAYTMSLGAENSVAYSNNSIAIPTNFTISVTTEILPVSMTKTSVDCTMYICGDSTECSNLLLQYGSFCTQLNRALTGIAVEQDKNTQEVFAQVKQIYKTPPIKDFGGFNFSQILPDPSKPSKRSFIEDLLFNKVTLADAGFIKQYGDCLGDIAARDLICAQKFNGLTVLPPLLTDEMIAQYTSALLAGTITSGWTFGAGAALQIPFAMQMAYRFNGIGVTQNVLYENQKLIANQFNSAIGKIQDSLSSTASALGKLQDVVNQNAQALNTLVKQLSSNFGAISSVLNDILSRLDPPEAEVQIDRLITGRLQSLQTYVTQQLIRAAEIRASANLAATKMSECVLGQSKRVDFCGKGYHLMSFPQSAPHGVVFLHVTYVPAQEKNFTTAPAICHDGKAHFPREGVFVSNGTHWFVTQRNFYEPQIITTDNTFVSGNCDVVIGIVNNTVYDPLQPELDSFKEELDKYFKNHTSPDVDLGDISGINASVVNIQKEIDRLNEVAKNLNESLIDLQELGKYEQYIKGSGRENLYFQGGGGSGYIPEAPRDGQAYVRKDGEWVLLSTFLGHHHHHHHH

SEQ ID NO: 5653 - protein, 1281 aa, Artificial Sequence
  Description of Artificial Sequence: Synthetic polypeptide
MGILPSPGMPALLSLVSLLSVLLMGCVAETGTQCVNLTTRTQLPPAYTNSFTRGVYYPDKVFRSSVLHSTQDLFLPFFSNVTWFHAIHVSGTNGTKRFDNPVLPFNDGVYFASTEKSNIIRGWIFGTTLDSKTQSLLIVNNATNVVIKVCEFQFCNDPFLGVYYHKNNKSWMESEFRVYSSANNCTFEYVSQPFLMDLEGKQGNFKNLREFVFKNIDGYFKIYSKHTPINLVRDLPQGFSALEPLVDLPIGINITRFQTLLALHRSYLTPGDSSSGWTAGAAAYYVGYLQPRTFLLKYNENGTITDAVDCALDPLSETKCTLKSFTVEKGIYQTSNFRVQPTESIVRFPNITNLCPFGEVFNATRFASVYAWNRKRISNCVADYRVLYNSASFSTFKCYGVSPTKLNDLCFTNVYADSFVIRGDEVRQIAPGQTGKIADYNYKLPDDFTGCVIAWNSNNLDSKVGGNYNYLYRLFRKSNLKPFERDISTEIYQAGSTPCNGVEGFNCYFPLQSYGFQPTNGVGYQPYRVVVLSFELLHAPATVCGPKKSTNLVKNKCVNFNFNGLTGTGVLTESNKKFLPFQQFGRDIADTTDAVRDPQTLEILDITPCSFGGVSVITPGTNTSNQVAVLYQDVNCTEVPVAIHADQLTPTWRVYSTGSNVFQTRAGCLIGAEHVNNSYECDIPIGAGICASYQTQTNSPSGAGSVASQSIIAYTMSLGAENSVAYSNNSIAIPTNFTISVTTEILPVSMTKTSVDCTMYICGDSTECSNLLLQYGSFCTQLNRALTGIAVEQDKNTQEVFAQVKQIYKTPPIKDFGGFNFSQILPDPSKPSKRSFIEDLLFNKVTLADAGFIKQYGDCLGDIAARDLICAQKFNGLTVLPPLLTDEMIAQYTSALLAGTITSGWTFGAGAALQIPFAMQMAYRFNGIGVTQNVLYENQKLIANQFNSAIGKIQDSLSSTASALGKLQDVVNQNAQALNTLVKQLSSNFGAISSVLNDILSRLDPPEAEVQIDRLITGRLQSLQTYVTQQLIRAAEIRASANLAATKMSECVLGQSKRVDFCGKGYHLMSFPQSAPHGVVFLHVTYVPAQEKNFTTAPAICHDGKAHFPREGVFVSNGTHWFVTQRNFYEPQIITTDNTFVSGNCDVVIGIVNNTVYDPLQPELDSFKEELDKYFKNHTSPDVDLGDISGINASVVNIQKEIDRLNEVAKNLNESLIDLQELGKYEQYIKGSGRENLYFQGGGGSGYIPEAPRDGQAYVRKDGEWVLLSTFLGHHHHHHHH

SEQ ID NO: 5654 - protein, 1281 aa, Artificial Sequence
  Description of Artificial Sequence: Synthetic polypeptide
MGILPSPGMPALLSLVSLLSVLLMGCVAETGTQCVNLTTRTQLPPAYTNSFTRGVYYPDKVFRSSVLHSTQDLFLPFFSNVTWFHAIHVSGTNGTKRFDNPVLPFNDGVYFASTEKSNIIRGWIFGTTLDSKTQSLLIVNNATNVVIKVCEFQFCNDPFLGVYYHKNNKSWMESEFRVYSSANNCTFEYVSQPFLMDLEGKQGNFKNLREFVFKNIDGYFKIYSKHTPINLVRDLPQGFSALEPLVDLPIGINITRFQTLLALHRSYLTPGDSSSGWTAGAAAYYVGYLQPRTFLLKYNENGTITDAVDCALDPLSETKCTLKSFTVEKGIYQTSNFRVQPTESIVRFPNITNLCPFGEVFNATRFASVYAWNRKRISNCVADYSVLYNSASFSTFKCYGVSPTKLNDLCFTNVYADSFVIRGDEVRQIAPGQTGKIADYNYKLPDDFTGCVIAWNSNNLDSKVGGNYNYLYRLFRKSNLKPFSRDISTEIYQAGSTPCNGVEGFNCYFPLQSYGFQPTNGVGYQPYRVVVLSFELLHAPATVCGPKKSTNLVKNKCVNFNFNGLTGTGVLTESNKKFLPFQQFGRDIADTTDAVRDPQTLEILDITPCSFGGVSVITPGTNTSNQVAVLYQDVNCTEVPVAIHADQLTPTWRVYSTGSNVFQTRAGCLIGAEHVNNSYECDIPIGAGICASYQTQTNSPSGAGSVASQSIIAYTMSLGAENSVAYSNNSIAIPTNFTISVTTEILPVSMTKTSVDCTMYICGDSTECSNLLLQYGSFCTQLNRALTGIAVEQDKNTQEVFAQVKQIYKTPPIKDFGGFNFSQILPDPSKPSKRSFIEDLLFNKVTLADAGFIKQYGDCLGDIAARDLICAQKFNGLTVLPPLLTDEMIAQYTSALLAGTITSGWTFGAGAALQIPFAMQMAYRFNGIGVTQNVLYENQKLIANQFNSAIGKIQDSLSSTASALGKLQDVVNQNAQALNTLVKQLSSNFGAISSVLNDILSRLDPPEAEVQIDRLITGRLQSLQTYVTQQLIRAAEIRASANLAATKMSECVLGQSKRVDFCGKGYHLMSFPQSAPHGVVFLHVTYVPAQEKNFTTAPAICHDGKAHFPREGVFVSNGTHWFVTQRNFYEPQIITTDNTFVSGNCDVVIGIVNNTVYDPLQPELDSFKEELDKYFKNHTSPDVDLGDISGINASVVNIQKEIDRLNEVAKNLNESLIDLQELGKYEQYIKGSGRENLYFQGGGGSGYIPEAPRDGQAYVRKDGEWVLLSTFLGHHHHHHHH

SEQ ID NO: 5655 - protein, 1281 aa, Artificial Sequence
  Description of Artificial Sequence: Synthetic polypeptide
MGILPSPGMPALLSLVSLLSVLLMGCVAETGTQCVNLTTRTQLPPAYTNSFTRGVYYPDKVFRSSVLHSTQDLFLPFFSNVTWFHAIHVSGTNGTKRFDNPVLPFNDGVYFASTEKSNIIRGWIFGTTLDSKTQSLLIVNNATNVVIKVCEFQFCNDPFLGVYYHKNNKSWMESEFRVYSSANNCTFEYVSQPFLMDLEGKQGNFKNLREFVFKNIDGYFKIYSKHTPINLVRDLPQGFSALEPLVDLPIGINITRFQTLLALHRSYLTPGDSSSGWTAGAAAYYVGYLQPRTFLLKYNENGTITDAVDCALDPLSETKCTLKSFTVEKGIYQTSNFRVQPTESIVRFPNITNLCPFGEVFNATRFASVYAWNRKRISNCVADYSVLYNSASFSTFKCYGVSPTKLNDLCFTNVYADSFVIRGDEVRQIAPGQTGKIADYNYKLPDDFTGCVIAWNSNNLDSKVGGNYNYLYRLFRKSNLKPFERDISTEIYQAGSTPCNGVEGFNCYFPLQSYGFQPTNGVGYQPYRVVVLSFELSHAPATVCGPKKSTNLVKNKCVNFNFNGLTGTGVLTESNKKFLPFQQFGRDIADTTDAVRDPQTLEILDITPCSFGGVSVITPGTNTSNQVAVLYQDVNCTEVPVAIHADQLTPTWRVYSTGSNVFQTRAGCLIGAEHVNNSYECDIPIGAGICASYQTQTNSPSGAGSVASQSIIAYTMSLGAENSVAYSNNSIAIPTNFTISVTTEILPVSMTKTSVDCTMYICGDSTECSNLLLQYGSFCTQLNRALTGIAVEQDKNTQEVFAQVKQIYKTPPIKDFGGFNFSQILPDPSKPSKRSFIEDLLFNKVTLADAGFIKQYGDCLGDIAARDLICAQKFNGLTVLPPLLTDEMIAQYTSALLAGTITSGWTFGAGAALQIPFAMQMAYRFNGIGVTQNVLYENQKLIANQFNSAIGKIQDSLSSTASALGKLQDVVNQNAQALNTLVKQLSSNFGAISSVLNDILSRLDPPEAEVQIDRLITGRLQSLQTYVTQQLIRAAEIRASANLAATKMSECVLGQSKRVDFCGKGYHLMSFPQSAPHGVVFLHVTYVPAQEKNFTTAPAICHDGKAHFPREGVFVSNGTHWFVTQRNFYEPQIITTDNTFVSGNCDVVIGIVNNTVYDPLQPELDSFKEELDKYFKNHTSPDVDLGDISGINASVVNIQKEIDRLNEVAKNLNESLIDLQELGKYEQYIKGSGRENLYFQGGGGSGYIPEAPRDGQAYVRKDGEWVLLSTFLGHHHHHHHH

SEQ ID NO: 5656 - protein, 1281 aa, Artificial Sequence
  Description of Artificial Sequence: Synthetic polypeptide
MGILPSPGMPALLSLVSLLSVLLMGCVAETGTQCVNLTTRTQLPPAYTNSFTRGVYYPDKVFRSSVLHSTQDLFLPFFSNVTWFHAIHVSGTNGTKRFDNPVLPFNDGVYFASTEKSNIIRGWIFGTTLDSKTQSLLIVNNATNVVIKVCEFQFCNDPFLGVYYHKNNKSWMESEFRVYSSANNCTFEYVSQPFLMDLEGKQGNFKNLREFVFKNIDGYFKIYSKHTPINLVRDLPQGFSALEPLVDLPIGINITRFQTLLALHRSYLTPGDSSSGWTAGAAAYYVGYLQPRTFLLKYNENGTITDAVDCALDPLSETKCTLKSFTVEKGIYQTSNFRVQPTESIVRFPNITNLCPFGEVFNATRFASVYAWNRKRISNCVADYSVLYNSASFSTFKCYGVSPTKLNDLCFTNVYADSFVIRGDEVRQIAPGQTGKIADYNYKLPDDFTGCVIAWNSNNLDSKVGGNYNYLYRLFRKSNLKPFERDISTVIYQAGSTPCNGVEGFNCYFPLQSYGFQPTNGVGYQPYRVVVLSFELLHAPATVCGPKKSTNLVKNKCVNFNFNGLTGTGVLTESNKKFLPFQQFGRDIADTTDAVRDPQTLEILDITPCSFGGVSVITPGTNTSNQVAVLYQDVNCTEVPVAIHADQLTPTWRVYSTGSNVFQTRAGCLIGAEHVNNSYECDIPIGAGICASYQTQTNSPSGAGSVASQSIIAYTMSLGAENSVAYSNNSIAIPTNFTISVTTEILPVSMTKTSVDCTMYICGDSTECSNLLLQYGSFCTQLNRALTGIAVEQDKNTQEVFAQVKQIYKTPPIKDFGGFNFSQILPDPSKPSKRSFIEDLLFNKVTLADAGFIKQYGDCLGDIAARDLICAQKFNGLTVLPPLLTDEMIAQYTSALLAGTITSGWTFGAGAALQIPFAMQMAYRFNGIGVTQNVLYENQKLIANQFNSAIGKIQDSLSSTASALGKLQDVVNQNAQALNTLVKQLSSNFGAISSVLNDILSRLDPPEAEVQIDRLITGRLQSLQTYVTQQLIRAAEIRASANLAATKMSECVLGQSKRVDFCGKGYHLMSFPQSAPHGVVFLHVTYVPAQEKNFTTAPAICHDGKAHFPREGVFVSNGTHWFVTQRNFYEPQIITTDNTFVSGNCDVVIGIVNNTVYDPLQPELDSFKEELDKYFKNHTSPDVDLGDISGINASVVNIQKEIDRLNEVAKNLNESLIDLQELGKYEQYIKGSGRENLYFQGGGGSGYIPEAPRDGQAYVRKDGEWVLLSTFLGHHHHHHHH

SEQ ID NO: 5657 - DNA, 735 bp, Artificial Sequence
  Description of Artificial Sequence: Synthetic polynucleotide
atgggcatcctgccaagcccaggaatgcccgccctgctgtctctggtgagcctgctgtccgtgctgctgatgggatgcgtggcagagacaggcacaaggttccctaacatcaccaatctgtgcccattcggcgaggtgtttaacgccacacgctttgcctccgtgtatgcctggaaccggaagagaatctctaattgcgtggccgactatagcgtgctgtacaatagcgcctccttctctacctttaagtgctatggcgtgagccccaccaagctgaacgatctgtgcttcacaaacgtgtacgccgactcctttgtgatccggggcgatgaagtgagacagatcgcaccaggacagaccggaaagatcgcagactacaactataagctgcctgacgatttcacaggctgcgtgatcgcctggaatagcaacaatctggattccaaagtgggcggcaactacaattatctgtacaggctgttccgcaagtccaacctgaagccatttgagcgggacatctccaccgagatctaccaggccggctctacaccctgcaacggcgtggagggcttcaatcattattttcccctgcagtcttacggcttccagcctacaaatggcgtgggctatcagccataccgggtggtggtgctgtcttttgagctgctgcacgcaccagcaaccgtgtgcggccccaagaagagcacacatcatcaccaccaccaccaccactga

SEQ ID NO: 5658 - DNA, 735 bp, Artificial Sequence
  Description of Artificial Sequence: Synthetic polynucleotide
atgggcatcctgccaagcccaggaatgcccgccctgctgtctctggtgagcctgctgtccgtgctgctgatgggatgcgtggcagagacaggcacaaggttccctccaatcaccaatctgtgcccattcggcgaggtgtttaacgccacacgctttgcctccgtgtatgcctggaaccggaagagaatctctaattgcgtggccgactatagcgtgctgtacaatagcgcctccttctctacctttaagtgctatggcgtgagccccaccaagctgaacgatctgtgcttcacaaacgtgtacgccgactcctttgtgatccggggcgatgaagtgagacagatcgcaccaggacagaccggaaagatcgcagactacaactataagctgcctgacgatttcacaggctgcgtgatcgcctggaatagcaacaatctggattccaaagtgggcggcaactacaattatctgtacaggctgttccgcaagtccaacctgaagccatttgagcgggacatctccaccgagatctaccaggccggctctacaccctgcaacggcgtggagggcttcaattgttattttcccctgcagtcttacggcttccagcctacaaatggcgtgggctatcagccataccgggtggtggtgctgtcttttgagctgctgcacgcaccagcaaccgtgtgcggccccaagaagagcacacatcatcaccaccaccaccaccactga

SEQ ID NO: 5659 - DNA, 735 bp, Artificial Sequence
  Description of Artificial Sequence: Synthetic polynucleotide
atgggcatcctgccaagcccaggaatgcccgccctgctgtctctggtgagcctgctgtccgtgctgctgatgggatgcgtggcagagacaggcacaaggttccctaacatcaccaatctgtgcccattcggcgaggtgtttaacgccacacgctttgcctccgtgtatgcctggaaccggaagagaatctctaattgcgtggccgacgtaagcgtgctgtacaatagcgcctccttctctacctttaagtgctatggcgtgagccccaccaagctgaacgatctgtgcttcacaaacgtgtacgccgactcctttgtgatccggggcgatgaagtgagacagatcgcaccaggacagaccggaaagatcgcagactacaactataagctgcctgacgatttcacaggctgcgtgatcgcctggaatagcaacaatctggattccaaagtgggcggcaactacaattatctgtacaggctgttccgcaagtccaacctgaagccatttgagcgggacatctccaccgagatctaccaggccggctctacaccctgcaacggcgtggagggcttcaattgttattttcccctgcagtcttacggcttccagcctacaaatggcgtgggctatcagccataccgggtggtggtgctgtcttttgagctgctgcacgcaccagcaaccgtgtgcggccccaagaagagcacacatcatcaccaccaccaccaccactga

SEQ ID NO: 5660 - DNA, 735 bp, Artificial Sequence
  Description of Artificial Sequence: Synthetic polynucleotide
atgggcatcctgccaagcccaggaatgcccgccctgctgtctctggtgagcctgctgtccgtgctgctgatgggatgcgtggcagagacaggcacaaggttccctaacatcaccaatctgtgcccattcggcgaggtgtttaacgccacacgctttgcctccgtgtatgcctggaaccggaagagaatctctaattgcgtggccgactatagcgtgctgtacaatagcgcctccttctctacctttaagtgctatggcgtgagccccaccaagctgaacgatctgtgcttcacaaacgtgtacgccgactcctttgtgatccggggcgatgaagtgagacagatcgcaccaggacagaccggaaagatcgcagactacaactataagctgcctgacgatttcacaggctgcgtgatcgcctggaatagcaacaatctggattccaaagtgggcggcaactacaattatctgtacaggctgttccgcaagtccaacctgaagccatttgagcgggacatctccaccgagatctaccaggccggctctacaccctgcaacggcgtggagggcttcaattgttattttcccctgcagtcttacaatttccagcctacaaatggcgtgggctatcagccataccgggtggtggtgctgtcttttgagctgctgcacgcaccagcaaccgtgtgcggccccaagaagagcacacatcatcaccaccaccaccaccactga

SEQ ID NO: 5661 - DNA, 735 bp, Artificial Sequence
  Description of Artificial Sequence: Synthetic polynucleotide
atgggcatcctgccaagcccaggaatgcccgccctgctgtctctggtgagcctgctgtccgtgctgctgatgggatgcgtggcagagacaggcacaaggttccctaacatcaccaatctgtgcccattcggcgaggtgtttaacgccacacgctttgcctccgtgtatgcctggaaccggaagagaatctctaattgcgtggccgactatagcgtgctgtacaatagcgcctccttctctacctttaagtgctatggcgtgagccccaccaagctgaacgatctgtgcttcacaaacgtgtacgccgacaaatttgtgatccggggcgatgaagtgagacagatcgcaccaggacagaccggaaagatcgcagactacaactataagctgcctgacgatttcacaggctgcgtgatcgcctggaatagcaacaatctggattccaaagtgggcggcaactacaattatctgtacaggctgttccgcaagtccaacctgaagccatttgagcgggacatctccaccgagatctaccaggccggctctacaccctgcaacggcgtggagggcttcaattgttattttcccctgcagtcttacggcttccagcctacaaatggcgtgggctatcagccataccgggtggtggtgctgtcttttgagctgctgcacgcaccagcaaccgtgtgcggccccaagaagagcacacatcatcaccaccaccaccaccactga

SEQ ID NO: 5662 - DNA, 735 bp, Artificial Sequence
  Description of Artificial Sequence: Synthetic polynucleotide
atgggcatcctgccaagcccaggaatgcccgccctgctgtctctggtgagcctgctgtccgtgctgctgatgggatgcgtggcagagacaggcacaaggttccctaacatcaccaatctgtgcccattcggcgaggtgtttaacgccacacgctttgcctccgtgtatgcctggaaccggaagagaatctctaattgcgtggccgactatagcgtgctgtacaatagcgcctccttctctacctttaagtgctatggcgtgagccccaccaagctgaacgatctgtgcttcacaaacgtgtacgccgactcctttgtgatccggggcgatgaagtgagacagatcgcaccaggacagaccggaaagatcgcagactacaactataagctgcctgacgatttcacaggctgcgtgatcgcctggaatagcaacaatctggattccaaagtgggcggcaactacaattatctgtacaggctgttccgcaagtccaacctgaagccatttgaggatgacatctccaccgagatctaccaggccggctctacaccctgcaacggcgtggagggcttcaattgttattttcccctgcagtcttacggcttccagcctacaaatggcgtgggctatcagccataccgggtggtggtgctgtcttttgagctgctgcacgcaccagcaaccgtgtgcggccccaagaagagcacacatcatcaccaccaccaccaccactga

SEQ ID NO: 5663 - DNA, 735 bp, Artificial Sequence
  Description of Artificial Sequence: Synthetic polynucleotide
atgggcatcctgccaagcccaggaatgcccgccctgctgtctctggtgagcctgctgtccgtgctgctgatgggatgcgtggcagagacaggcacaaggttccctaacatcaccaatctgtgcccattcggcgaggtgtttaacgccacacgctttgcctccgtgtatgcctggaaccggaagagaatctctaattgcgtggccgactatagcgtgctgtacaatagcgcctccttctctacctttaagtgctatggcgtgagccccaccaagctgaacgatctgtgcttcacaaacgtgtacgccgactcctttgtgatccggggcgatgaagtgagacagatcgcaccaggacagaccggaaagatcgcagactacaactataagctgcctgacgatttcacaggctgcgtgatcgcctggaatagccgaaatctggattccaaagtgggcggcaactacaattatctgtacaggctgttccgcaagtccaacctgaagccatttgagcgggacatctccaccgagatctaccaggccggctctacaccctgcaacggcgtggagggcttcaattgttattttcccctgcagtcttacggcttccagcctacaaatggcgtgggctatcagccataccgggtggtggtgctgtcttttgagctgctgcacgcaccagcaaccgtgtgcggccccaagaagagcacacatcatcaccaccaccaccaccactga

SEQ ID NO: 5664 - DNA, 735 bp, Artificial Sequence
  Description of Artificial Sequence: Synthetic polynucleotide
atgggcatcctgccaagcccaggaatgcccgccctgctgtctctggtgagcctgctgtccgtgctgctgatgggatgcgtggcagagacaggcacaaggttccctaacatcaccaatctgtgcccattcggcgaggtgtttaacgccacacgctttgcctccgtgtatgcctggaaccggaagagaatctctaattgcgtgtttgactatagcgtgctgtacaatagcgcctccttctctacctttaagtgctatggcgtgagccccaccaagctgaacgatctgtgcttcacaaacgtgtacgccgactcctttgtgatccggggcgatgaagtgagacagatcgcaccaggacagaccggaaagatcgcagactacaactataagctgcctgacgatttcacaggctgcgtgatcgcctggaatagcaacaatctggattccaaagtgggcggcaactacaattatctgtacaggctgttccgcaagtccaacctgaagccatttgagcgggacatctccaccgagatctaccaggccggctctacaccctgcaacggcgtggagggcttcaattgttattttcccctgcagtcttacggcttccagcctacaaatggcgtgggctatcagccataccgggtggtggtgctgtcttttgagctgctgcacgcaccagcaaccgtgtgcggccccaagaagagcacacatcatcaccaccaccaccaccactga

SEQ ID NO: 5665 - DNA, 735 bp, Artificial Sequence
  Description of Artificial Sequence: Synthetic polynucleotide
atgggcatcctgccaagcccaggaatgcccgccctgctgtctctggtgagcctgctgtccgtgctgctgatgggatgcgtggcagagacaggcacaaggttccctaacatcaccaatctgtgcccattcggcgaggtgtttaacgccacacgctttgcctccgtgtatgcctggaaccggaagagaatctctaattgcgtggccgactatagcgtgctgtacaatagcgcctccttctctacctttaagtgctatggcgtgagcgcgaccaagctgaacgatctgtgcttcacaaacgtgtacgccgactcctttgtgatccggggcgatgaagtgagacagatcgcaccaggacagaccggaaagatcgcagactacaactataagctgcctgacgatttcacaggctgcgtgatcgcctggaatagcaacaatctggattccaaagtgggcggcaactacaattatctgtacaggctgttccgcaagtccaacctgaagccatttgagcgggacatctccaccgagatctaccaggccggctctacaccctgcaacggcgtggagggcttcaattgttattttcccctgcagtcttacggcttccagcctacaaatggcgtgggctatcagccataccgggtggtggtgctgtcttttgagctgctgcacgcaccagcaaccgtgtgcggccccaagaagagcacacatcatcaccaccaccaccaccactga

SEQ ID NO: 5666 - DNA, 735 bp, Artificial Sequence
  Description of Artificial Sequence: Synthetic polynucleotide
atgggcatcctgccaagcccaggaatgcccgccctgctgtctctggtgagcctgctgtccgtgctgctgatgggatgcgtggcagagacaggcacaaggttccctaacatcaccaatctgtgcccattcggcgaggtgtttaacgccacacgctttgcctccgtgtatgcctggaaccggaagagaatctctaattgcgtggccgactatagcgtgctgtacaatagcgcctccttctctacctttaagtgctatggcgtgagccccaccaagctgaacgatctgtgcttcacaaacgtgtacgccgactcctttgtgatccggggcgatgaagtgagacagatcgcaccaggacagaccggaaagatcgcagactacaactataagctgcctgacgatttcacaggctgcgtgatcgcctggaatagcaacaatctggattccaaagtgggcggcaactacaattatctgtacaggctgttccgcaagtccaacctgaagccatttgagcgggacatctccaccgagcactaccaggccggctctacaccctgcaacggcgtggagggcttcaattgttattttcccctgcagtcttacggcttccagcctacaaatggcgtgggctatcagccataccgggtggtggtgctgtcttttgagctgctgcacgcaccagcaaccgtgtgcggccccaagaagagcacacatcatcaccaccaccaccaccactga

SEQ ID NO: 5667 - DNA, 735 bp, Artificial Sequence
  Description of Artificial Sequence: Synthetic polynucleotide
atgggcatcctgccaagcccaggaatgcccgccctgctgtctctggtgagcctgctgtccgtgctgctgatgggatgcgtggcagagacaggcacaaggttccctaacatcaccaatctgtgcccattcggcgaggtgtttaacgccacacgctttgcctccgtgtatgcctggaaccggaagagaatctctaattgcgtggccgactatagcgtgctgtacaatagcgcctccttctctacctttaagtgctatggcgtgagccccaccaagctgaacgatctgtgcttcacaaacgtgtacgccgactcctttgtgatccggggcgatgaagtgagacagatcgcaccaggacagaccggaaagatcgcagactacaactataagctgcctgacgatttcacaggctgcgtgatcgcctggaatagcaacaatctggattccaaagtgggcggcaactacaattatctgtacaggctgttccgcaagtccaacctgaagccatttgagcgggacatctccaccgaggaataccaggccggctctacaccctgcaacggcgtggagggcttcaattgttattttcccctgcagtcttacggcttccagcctacaaatggcgtgggctatcagccataccgggtggtggtgctgtcttttgagctgctgcacgcaccagcaaccgtgtgcggccccaagaagagcacacatcatcaccaccaccaccaccactga

SEQ ID NO: 5668 - DNA, 735 bp, Artificial Sequence
  Description of Artificial Sequence: Synthetic polynucleotide
atgggcatcctgccaagcccaggaatgcccgccctgctgtctctggtgagcctgctgtccgtgctgctgatgggatgcgtggcagagacaggcacaaggttccctaacatcaccaatctgtgcccattcggcgaggtgtttaacgccacacgctttgcctccgtgtatgcctggaaccggaagagaatctctaattgcgtggccgactatagcgtgctgtacaatagcgcctccttctctacctttaagtgctatggcgtgagccccaccaagctgaacgatctgtgcttcacaaacgtgtacgccgactcctttgtgatccggggcgatgaagtgagacagatcgcaccaggacagaccggaaagatcgcagactacaactataagctgcctgacgatttcacaggctgcgtgatcgcctggaatagccataatctggattccaaagtgggcggcaactacaattatctgtacaggctgttccgcaagtccaacctgaagccatttgagcgggacatctccaccgagatctaccaggccggctctacaccctgcaacggcgtggagggcttcaattgttattttcccctgcagtcttacggcttccagcctacaaatggcgtgggctatcagccataccgggtggtggtgctgtcttttgagctgctgcacgcaccagcaaccgtgtgcggccccaagaagagcacacatcatcaccaccaccaccaccactga

SEQ ID NO: 5669 - DNA, 735 bp, Artificial Sequence
  Description of Artificial Sequence: Synthetic polynucleotide
atgggcatcctgccaagcccaggaatgcccgccctgctgtctctggtgagcctgctgtccgtgctgctgatgggatgcgtggcagagacaggcacaaggttccctaacatcaccaatctgtgcccattcggcgaggtgtttaacgccacacgctttgcctccgtgtatgcctggaaccggaagagaatctctaattgcgtggccgactatagcgtgctgtacaatagcgcctccttctctacctttaagtgctatggcgtgagccccaccaagctgaacgatctgtgcttcacaaacgtgtacgccgactcctttgtgatccggggcgatgaagtgagacagatcgcaccaggacagaccggaaagatcgcagactacaactataagctgcctgacgatttcacaggctgcgtgatcgcctggaatagcaacaatctggattccaaagtgggcggcaactacaattatctgtacaggctgttccgcaagtccaacctggggccatttgagcgggacatctccaccgagatctaccaggccggctctacaccctgcaacggcgtggagggcttcaattgttattttcccctgcagtcttacggcttccagcctacaaatggcgtgggctatcagccataccgggtggtggtgctgtcttttgagctgctgcacgcaccagcaaccgtgtgcggccccaagaagagcacacatcatcaccaccaccaccaccactga

SEQ ID NO: 5670 - DNA, 735 bp, Artificial Sequence
  Description of Artificial Sequence: Synthetic polynucleotide
atgggcatcctgccaagcccaggaatgcccgccctgctgtctctggtgagcctgctgtccgtgctgctgatgggatgcgtggcagagacaggcacaaggttccctaacatcaccaatctgtgcccattcggcgaggtgtttaacgccacacgctttgcctccgtgtatgcctggaaccggaagagaatctctaattgcgtggccgactatagcgtgctgtacaatagcgcctccttctctacctttaagtgctatggcgtgagccccaccaagctgaacgatctgtgcttcacaaacgtgtacgccgactcctttgtgatccggggcgatgaagtgagacagatcgcaccaggacagaccggaaagatcgcagactacaactataagctgcctgacgatttcacaggctgcgtgatcgcctggaatagctgtaatctggattccaaagtgggcggcaactacaattatctgtacaggctgttccgcaagtccaacctgaagccatttgagcgggacatctccaccgagatctaccaggccggctctacaccctgcaacggcgtggagggcttcaattgttattttcccctgcagtcttacggcttccagcctacaaatggcgtgggctatcagccataccgggtggtggtgctgtcttttgagctgctgcacgcaccagcaaccgtgtgcggccccaagaagagcacacatcatcaccaccaccaccaccactga

SEQ ID NO: 5671 - DNA, 735 bp, Artificial Sequence
  Description of Artificial Sequence: Synthetic polynucleotide
atgggcatcctgccaagcccaggaatgcccgccctgctgtctctggtgagcctgctgtccgtgctgctgatgggatgcgtggcagagacaggcacaaggttccctaacatcaccaatctgtgcccattcggcgaggtgtttaacgccacacgctttgcctccgtgtatgcctggaaccggaagagaatctctaattgcgtggccgactatagcgtgctgtacaatagcgcctccttctctacctttaagtgctatggcgtgagccccaccaagctgaacgatctgtgcttcacaaacgtgtacgccgactcctttgtgatccggggcgatgaagtgagacagatcgcaccaggacagaccggaaagatcgcagactacaactataagctgcctgacgatttcacaggctgcgtgatcgcctggaatagcaacaatctggattccaaagtgggcggcaactacaattatctgtacaggctgttccgcaagtccaacctgaagccatttgagcgggacatctccaccgagatctaccaggccggctctacaccctgcaacggcgtggagggcttcaattgttattttcccctgcagtcttacggcttccagcctacaaatggcgtgggctatcagccacaccgggtggtggtgctgtcttttgagctgctgcacgcaccagcaaccgtgtgcggccccaagaagagcacacatcatcaccaccaccaccaccactga

SEQ ID NO: 5672 - DNA, 735 bp, Artificial Sequence
  Description of Artificial Sequence: Synthetic polynucleotide
atgggcatcctgccaagcccaggaatgcccgccctgctgtctctggtgagcctgctgtccgtgctgctgatgggatgcgtggcagagacaggcacaaggttccctaacatcaccaatctgtgcccattcggcgaggtgtttaacgccacacgctttgcctccgtgtatgcctggaaccggaagagaatctctaattgcgtggccgactatagcgtgctgtacaatagcgcctccttctctacctttaagtgctatggcgtgagccccaccaagctgaacgatctgtgcttcacaaacgtgtacgccgactcctttgtgatccggggcgatgaagtgagacagatcgcaccaggacagaccggaaagatcgcagactacaactataagctgcctgacgatttcacaggctgcgtgatcgcctggaatagcaacaatctggattccaaagtgggcggcaactacaattatctgtacaggctgttccgcaagtccaacctgaagccatttgagcgggacatctccaccgagatctaccaggccggctctacaccctataacggcgtggagggcttcaattgttattttcccctgcagtcttacggcttccagcctacaaatggcgtgggctatcagccataccgggtggtggtgctgtcttttgagctgctgcacgcaccagcaaccgtgtgcggccccaagaagagcacacatcatcaccaccaccaccaccactga

SEQ ID NO: 5673 - DNA, 735 bp, Artificial Sequence
  Description of Artificial Sequence: Synthetic polynucleotide
atgggcatcctgccaagcccaggaatgcccgccctgctgtctctggtgagcctgctgtccgtgctgctgatgggatgcgtggcagagacaggcacaaggttccctaacatcaccaatctgtgcccattcggcgaggtgtttaacgccacacgctttgcctccgtgtatgcctggaaccggaagagaatctctaattgcgtggccgactatagcgtgctgtacaatagcgcctccttctctacctttaagtgctatggcgtgagccccaccaagctgaacgatctgtgcttcacaaacgtgtacgccgactcctttgtgatccggggcgatgaagtgaaacagatcgcaccaggacagaccggaaagatcgcagactacaactataagctgcctgacgatttcacaggctgcgtgatcgcctggaatagcaacaatctggattccaaagtgggcggcaactacaattatctgtacaggctgttccgcaagtccaacctgaagccatttgagcgggacatctccaccgagatctaccaggccggctctacaccctgcaacggcgtggagggcttcaattgttattttcccctgcagtcttacggcttccagcctacaaatggcgtgggctatcagccataccgggtggtggtgctgtcttttgagctgctgcacgcaccagcaaccgtgtgcggccccaagaagagcacacatcatcaccaccaccaccaccactga

SEQ ID NO: 5674 - DNA, 735 bp, Artificial Sequence
  Description of Artificial Sequence: Synthetic polynucleotide
atgggcatcctgccaagcccaggaatgcccgccctgctgtctctggtgagcctgctgtccgtgctgctgatgggatgcgtggcagagacaggcacaaggttccctaacatcaccaatctgtgcccattcggcgaggtgtttaacgccacacgctttgcctccgtgtatgcctggaaccggaagagaatctctaattgcgtggccgactatagcgtgctgtacaatagcgcctccttctctacctttaagtgctatggcgtgagccccaccaagctgaacgatctgtgcttcacaaacgtgtacgccgactcctttgtgatccggggcgatgaagtgagacagatcgcaccaggacagaccggaaagatcgcagactacaactataagctgcctgacgatttcacaggctgcgtgatcgcctggaatagcaacaatctggattccaaagtgggcggcaactacaattatctgtacaggctgttccgcaagtccaacctgaagccatttgagcgggacatctcctcagagatctaccaggccggctctacaccctgcaacggcgtggagggcttcaattgttattttcccctgcagtcttacggcttccagcctacaaatggcgtgggctatcagccataccgggtggtggtgctgtcttttgagctgctgcacgcaccagcaaccgtgtgcggccccaagaagagcacacatcatcaccaccaccaccaccactga

SEQ ID NO: 5675 - DNA, 735 bp, Artificial Sequence
  Description of Artificial Sequence: Synthetic polynucleotide
atgggcatcctgccaagcccaggaatgcccgccctgctgtctctggtgagcctgctgtccgtgctgctgatgggatgcgtggcagagacaggcacaaggttccctaacatcaccaatctgtgcccattcggcgaggtgtttaacgccacacgctttgcctccgtgtatgcctggaaccggaagagaatctctaattgcgtggccgactatagcgtgctgtacaatagcgcctccttctctacctttaagtgctatggcgtgagccccaccaagctgaacgatctgtgcttcacaaacgtgtacgccgactcctttgtgatccggggcgatgaagtgagacagatcgcaccaggacagaccggaaagatcgcagactacaactataagctgcctgacgatttcacaggctgcgtgatcgcctggaatagcaacaatctggattccaaagtgggcggcaactacaattatctgtacaggctgttccgcaagtccaacctgaagccatttgagcgggacatctccaccgagatctaccaggccggctctacaccctgcaacggcgtggagggcttcaatcaatattttcccctgcagtcttacggcttccagcctacaaatggcgtgggctatcagccataccgggtggtggtgctgtcttttgagctgctgcacgcaccagcaaccgtgtgcggccccaagaagagcacacatcatcaccaccaccaccaccactga

SEQ ID NO: 5676 - DNA, 735 bp, Artificial Sequence
  Description of Artificial Sequence: Synthetic polynucleotide
atgggcatcctgccaagcccaggaatgcccgccctgctgtctctggtgagcctgctgtccgtgctgctgatgggatgcgtggcagagacaggcacaaggttccctaacatcaccaatctgtgcccattcggcgaggtgtttaacgccacacgctttgcctccgtgtatgcctggaaccggaagagaatctctaattgcgtggccgactatagcgtgctgtacaatagcgcctccttctctacctttaagtgctatggcgtgagccccaccaagctgaacgatctgtgcttcacaaacgtgtacgccgactcctttgtgatccggggcgatgaagtgagacagatcgcaccaggacagaccggaaagatcgcagactacaactataagctgcctgacgatttcacaggctgcgtgatcgcctggaatagcaacaatctggattccaaagtgggcggcaactacaattatctgtacaggctgttccgcaagtccaacctgaagccatttgagcgggacatctccgcggagatctaccaggccggctctacaccctgcaacggcgtggagggcttcaattgttattttcccctgcagtcttacggcttccagcctacaaatggcgtgggctatcagccataccgggtggtggtgctgtcttttgagctgctgcacgcaccagcaaccgtgtgcggccccaagaagagcacacatcatcaccaccaccaccaccactga

SEQ ID NO: 5677 - DNA, 735 bp, Artificial Sequence
  Description of Artificial Sequence: Synthetic polynucleotide
atgggcatcctgccaagcccaggaatgcccgccctgctgtctctggtgagcctgctgtccgtgctgctgatgggatgcgtggcagagacaggcacaaggttccctaacatcaccaatctgtgcccattcggcgaggtgtttaacgccacacgctttgcctccgtgtatgcctggaaccggaagagaatctctaattgcgtggccgactatagcgtgctgtacaatagcgcctccttctctacctttaagtgctatggcgtgagccccaccaagctgaacgatctgtgcttcacaaacgtgtacgccgactcctttgtgatccggggcgatgaagtgagacagatcgcaccaggacagaccggaaagatcgcagactacaactataagctgcctgacgatttcacaggctgcgtgatcgcctggaatagcataaatctggattccaaagtgggcggcaactacaattatctgtacaggctgttccgcaagtccaacctgaagccatttgagcgggacatctccaccgagatctaccaggccggctctacaccctgcaacggcgtggagggcttcaattgttattttcccctgcagtcttacggcttccagcctacaaatggcgtgggctatcagccataccgggtggtggtgctgtcttttgagctgctgcacgcaccagcaaccgtgtgcggccccaagaagagcacacatcatcaccaccaccaccaccactga

SEQ ID NO: 5678 - DNA, 735 bp, Artificial Sequence
  Description of Artificial Sequence: Synthetic polynucleotide
atgggcatcctgccaagcccaggaatgcccgccctgctgtctctggtgagcctgctgtccgtgctgctgatgggatgcgtggcagagacaggcacaaggttccctaacatcaccaatctgtgcccattcggcgaggtgtttaacgccacacgctttgcctccgtgtatgcctggaaccggaagagaatctctaattgcgtggccgactatagcgtgctgtacaatagcgcctccttctctacctttaagtgctatggcgtgagccccaccaagctgaacgatctgtgcttcacaaacgtgtacgccgactcctttttgatccggggcgatgaagtgagacagatcgcaccaggacagaccggaaagatcgcagactacaactataagctgcctgacgatttcacaggctgcgtgatcgcctggaatagcaacaatctggattccaaagtgggcggcaactacaattatctgtacaggctgttccgcaagtccaacctgaagccatttgagcgggacatctccaccgagatctaccaggccggctctacaccctgcaacggcgtggagggcttcaattgttattttcccctgcagtcttacggcttccagcctacaaatggcgtgggctatcagccataccgggtggtggtgctgtcttttgagctgctgcacgcaccagcaaccgtgtgcggccccaagaagagcacacatcatcaccaccaccaccaccactga

SEQ ID NO: 5679 - DNA, 735 bp, Artificial Sequence
  Description of Artificial Sequence: Synthetic polynucleotide
atgggcatcctgccaagcccaggaatgcccgccctgctgtctctggtgagcctgctgtccgtgctgctgatgggatgcgtggcagagacaggcacaaggttccctaacatcaccaatctgtgcccatacggcgaggtgtttaacgccacacgctttgcctccgtgtatgcctggaaccggaagagaatctctaattgcgtggccgactatagcgtgctgtacaatagcgcctccttctctacctttaagtgctatggcgtgagccccaccaagctgaacgatctgtgcttcacaaacgtgtacgccgactcctttgtgatccggggcgatgaagtgagacagatcgcaccaggacagaccggaaagatcgcagactacaactataagctgcctgacgatttcacaggctgcgtgatcgcctggaatagcaacaatctggattccaaagtgggcggcaactacaattatctgtacaggctgttccgcaagtccaacctgaagccatttgagcgggacatctccaccgagatctaccaggccggctctacaccctgcaacggcgtggagggcttcaattgttattttcccctgcagtcttacggcttccagcctacaaatggcgtgggctatcagccataccgggtggtggtgctgtcttttgagctgctgcacgcaccagcaaccgtgtgcggccccaagaagagcacacatcatcaccaccaccaccaccactga

SEQ ID NO: 5680 - DNA, 735 bp, Artificial Sequence
  Description of Artificial Sequence: Synthetic polynucleotide
atgggcatcctgccaagcccaggaatgcccgccctgctgtctctggtgagcctgctgtccgtgctgctgatgggatgcgtggcagagacaggcacaaggttccctaacatcaccaatctgtgcccattcggcgaggtgtttaacgccacacgctttgcctccgtgtatgcctggaaccggaagagaatctctaattgcgtggccgactatagcgtgctgtacaatagcgcctccttctctacctttaagtgctatggcgtgagccccaccaagctgaacgatctgtgcttcacaaacgtgtacgccgactcctttgtgatccggggcgatgaagtgagacagatcgcaccaggacagaccggaaagatcgcagactacaactataagctgcctgacgatttcacaggctgcgtgatcgcctggaatagcaacaatctggattccaaaaaaggcggcaactacaattatctgtacaggctgttccgcaagtccaacctgaagccatttgagcgggacatctccaccgagatctaccaggccggctctacaccctgcaacggcgtggagggcttcaattgttattttcccctgcagtcttacggcttccagcctacaaatggcgtgggctatcagccataccgggtggtggtgctgtcttttgagctgctgcacgcaccagcaaccgtgtgcggccccaagaagagcacacatcatcaccaccaccaccaccactga

SEQ ID NO: 5681 - DNA, 735 bp, Artificial Sequence
  Description of Artificial Sequence: Synthetic polynucleotide
atgggcatcctgccaagcccaggaatgcccgccctgctgtctctggtgagcctgctgtccgtgctgctgatgggatgcgtggcagagacaggcacaaggttccctaacatcaccaatctgtgcccattcggcgaggtgtttaacgccacacgctttgcctccgtgtatgcctggaaccggaagagaatctctaattgcgtggccgactatagcgtgctgtacaatagcgcctccttctctacctttaagtgctatggcgtgagcaaaaccaagctgaacgatctgtgcttcacaaacgtgtacgccgactcctttgtgatccggggcgatgaagtgagacagatcgcaccaggacagaccggaaagatcgcagactacaactataagctgcctgacgatttcacaggctgcgtgatcgcctggaatagcaacaatctggattccaaagtgggcggcaactacaattatctgtacaggctgttccgcaagtccaacctgaagccatttgagcgggacatctccaccgagatctaccaggccggctctacaccctgcaacggcgtggagggcttcaattgttattttcccctgcagtcttacggcttccagcctacaaatggcgtgggctatcagccataccgggtggtggtgctgtcttttgagctgctgcacgcaccagcaaccgtgtgcggccccaagaagagcacacatcatcaccaccaccaccaccactga

SEQ ID NO: 5682 - DNA, 735 bp, Artificial Sequence
  Description of Artificial Sequence: Synthetic polynucleotide
atgggcatcctgccaagcccaggaatgcccgccctgctgtctctggtgagcctgctgtccgtgctgctgatgggatgcgtggcagagacaggcacaaggttccctaacatcaccaatctgtgcccattcggcgaggtgtttaacgccacacgctttgcctccgtgtatgcctggaaccggaagagaatctctaattgcgtggccgactatagcgtgctgtacaatagcgcctccttctctacctttaagtgctatggcgtgagccccaccaagctgaacgatctgtgcttcacaaacgtgtacgccgactcctttgtgatccggggcgatgaagtgagacagatcgcaccaggacagaccggaaagatcgcagactacaactataagctgcctgacgatttcacaggctgcgtgatcgcctggaatagcaacaatctggattccaaacaaggcggcaactacaattatctgtacaggctgttccgcaagtccaacctgaagccatttgagcgggacatctccaccgagatctaccaggccggctctacaccctgcaacggcgtggagggcttcaattgttattttcccctgcagtcttacggcttccagcctacaaatggcgtgggctatcagccataccgggtggtggtgctgtcttttgagctgctgcacgcaccagcaaccgtgtgcggccccaagaagagcacacatcatcaccaccaccaccaccactga

SEQ ID NO: 5683 - DNA, 735 bp, Artificial Sequence
  Description of Artificial Sequence: Synthetic polynucleotide
atgggcatcctgccaagcccaggaatgcccgccctgctgtctctggtgagcctgctgtccgtgctgctgatgggatgcgtggcagagacaggcacaaggttccctaacatcaccaatctgtgcccattcggcgaggtgtttaacgccacacgctttgcctccgtgtatgcctggaaccggaagagaatctctaattgcgtggccgactatagcgtgctgtacaatagcgcctccttctctacctttaagtgctatggcgtgagccccaccaagctgaacgatctgtgcttcacaaacgtgtacgccgactcctttgtgatccggggcgatgaagtgagacagatcgcaccaggacagaccggaaagatcgcagactacaactataagctgcctgacgatttcacaggctgcgtgatcgcctggaatagcaacaatctggattccaaagtgggcggcaactacaattatctgtacaggctgttccgcaagtccaacctgaagccatttgagcgggacatctccaccgagcgataccaggccggctctacaccctgcaacggcgtggagggcttcaattgttattttcccctgcagtcttacggcttccagcctacaaatggcgtgggctatcagccataccgggtggtggtgctgtcttttgagctgctgcacgcaccagcaaccgtgtgcggccccaagaagagcacacatcatcaccaccaccaccaccactga

SEQ ID NO: 5684 - DNA, 735 bp, Artificial Sequence
  Description of Artificial Sequence: Synthetic polynucleotide
atgggcatcctgccaagcccaggaatgcccgccctgctgtctctggtgagcctgctgtccgtgctgctgatgggatgcgtggcagagacaggcacaaggttccctaacatcaccaatctgtgcccattcggcgaggtgtttaacgccacacgctttgcctccgtgtatgcctggaaccggaagagaatctctaattgcgtggccgactatagcgtgctgtacaatagcgcctccttctctacctttaagtgctatggcgtgagccccaccaagctgaacgatctgtgcttcacaaacgtgtacgccgactcctttgtgatccggggcgatgaagtgagacagatcgcaccaggacagaccggaaagatcgcagactacaactatgttctgcctgacgatttcacaggctgcgtgatcgcctggaatagcaacaatctggattccaaagtgggcggcaactacaattatctgtacaggctgttccgcaagtccaacctgaagccatttgagcgggacatctccaccgagatctaccaggccggctctacaccctgcaacggcgtggagggcttcaattgttattttcccctgcagtcttacggcttccagcctacaaatggcgtgggctatcagccataccgggtggtggtgctgtcttttgagctgctgcacgcaccagcaaccgtgtgcggccccaagaagagcacacatcatcaccaccaccaccaccactga

SEQ ID NO: 5685 - DNA, 735 bp, Artificial Sequence
  Description of Artificial Sequence: Synthetic polynucleotide
atgggcatcctgccaagcccaggaatgcccgccctgctgtctctggtgagcctgctgtccgtgctgctgatgggatgcgtggcagagacaggcacaaggttccctaacatcaccaatctgtgcccattcggcgaggtgtttaacgccacacgctttgcctccgtgtatgcctggaaccggaagagaatctctaattgcgtggccgactatagcgtgctgtacaatagcgcctccttctctacctttaagtgctatggcgtgagccccaccaagctgaacgatctgtgcttcacaaacgtgtacgccgactcctttgtgatccggggcgatgaagtgagacagatcgcaccaggacagaccggaaagatcgcagactacaactataagctgcctgacgatttcacaggctgcgtgatcgcctggaatagcaacaatctggattccaaagtgggcggcaactacaattatctgtacaggctgttccgcaagtccaacctgaagccatttgagatagacatctccaccgagatctaccaggccggctctacaccctgcaacggcgtggagggcttcaattgttattttcccctgcagtcttacggcttccagcctacaaatggcgtgggctatcagccataccgggtggtggtgctgtcttttgagctgctgcacgcaccagcaaccgtgtgcggccccaagaagagcacacatcatcaccaccaccaccaccactga

SEQ ID NO: 5686 - DNA, 735 bp, Artificial Sequence
  Description of Artificial Sequence: Synthetic polynucleotide
atgggcatcctgccaagcccaggaatgcccgccctgctgtctctggtgagcctgctgtccgtgctgctgatgggatgcgtggcagagacaggcacaaggttccctaacatcaccaatctgtgcccattcggcgaggtgtttaacgccacacgctttgcctccgtgtatgcctggaaccggaagagaatctctaattgcgtggccgactatagcgtgctgtacaatagcgcctccttctctacctttaagtgctatggcgtgagccccaccaagctgaacgatctgtgcttcacaaacgtgtacgccgactcctttgtgatccggggcgatgaagtgagacagatcgcaccaggacagaccggaaagatcgcagactacaactataagctgcctgacgatttcacaggctgcgtgatcgcctggaatagcaacaatctggattccaaagtgggcggcaactacaattatctgtacaggctgttccgcaagtccaacctgaagccatttgagcgggacatctccgaagagatctaccaggccggctctacaccctgcaacggcgtggagggcttcaattgttattttcccctgcagtcttacggcttccagcctacaaatggcgtgggctatcagccataccgggtggtggtgctgtcttttgagctgctgcacgcaccagcaaccgtgtgcggccccaagaagagcacacatcatcaccaccaccaccaccactga

SEQ ID NO: 5687 - DNA, 735 bp, Artificial Sequence
  Description of Artificial Sequence: Synthetic polynucleotide
atgggcatcctgccaagcccaggaatgcccgccctgctgtctctggtgagcctgctgtccgtgctgctgatgggatgcgtggcagagacaggcacaaggttccctaacatcaccaatctgtgcccattcggcgaggtgtttaacgccacacgctttgcctccgtgtatgcctggaaccggaagagatggtctaattgcgtggccgactatagcgtgctgtacaatagcgcctccttctctacctttaagtgctatggcgtgagccccaccaagctgaacgatctgtgcttcacaaacgtgtacgccgactcctttgtgatccggggcgatgaagtgagacagatcgcaccaggacagaccggaaagatcgcagactacaactataagctgcctgacgatttcacaggctgcgtgatcgcctggaatagcaacaatctggattccaaagtgggcggcaactacaattatctgtacaggctgttccgcaagtccaacctgaagccatttgagcgggacatctccaccgagatctaccaggccggctctacaccctgcaacggcgtggagggcttcaattgttattttcccctgcagtcttacggcttccagcctacaaatggcgtgggctatcagccataccgggtggtggtgctgtcttttgagctgctgcacgcaccagcaaccgtgtgcggccccaagaagagcacacatcatcaccaccaccaccaccactga

SEQ ID NO: 5688 - DNA, 735 bp, Artificial Sequence
  Description of Artificial Sequence: Synthetic polynucleotide
atgggcatcctgccaagcccaggaatgcccgccctgctgtctctggtgagcctgctgtccgtgctgctgatgggatgcgtggcagagacaggcacaaggttccctaacatcaccaatctgtgcccattcggcgaggtgtttaacgccacacgctttgcctccgtgtatgcctggaaccggaagagaatctctaattgcgtggccgactatagcgtgctgtacaatagcgcctccttctctacctttaagtgctatggcgtgagccccaccaagctgaacgatctgtgcttcacaaacgtgtacgccgactcctttgtgatccggggcgatgaagtgagacagatcgcaccaggacagaccggaaagatcgcagactacaactataagctgcctgacgatttcacaggctgcgtgatcgcctggaatagcgtaaatctggattccaaagtgggcggcaactacaattatctgtacaggctgttccgcaagtccaacctgaagccatttgagcgggacatctccaccgagatctaccaggccggctctacaccctgcaacggcgtggagggcttcaattgttattttcccctgcagtcttacggcttccagcctacaaatggcgtgggctatcagccataccgggtggtggtgctgtcttttgagctgctgcacgcaccagcaaccgtgtgcggccccaagaagagcacacatcatcaccaccaccaccaccactga

SEQ ID NO: 5689 - DNA, 735 bp, Artificial Sequence
  Description of Artificial Sequence: Synthetic polynucleotide
atgggcatcctgccaagcccaggaatgcccgccctgctgtctctggtgagcctgctgtccgtgctgctgatgggatgcgtggcagagacaggcacaaggttccctaacatcaccaatctgtgcccattcggcgaggtgtttaacgccacacgctttgcctccgtgtatgcctggaaccggaagagaatctctaattgcgtggccgactatagcgtgctgtacaatagcgcctccttctctacctttaagtgctatggcgtgagccccaccaagctgaacgatctgtgcttcacaaacgtgtacgccgactcctttgtgatccggggcgatgaagtgagacagatcgcaccaggacagaccggaaagatcgcagactacaactataagctgcctgacgatttcacaggctgcgtgatcgcctggaatagcaacaatctggattccaaattgggcggcaactacaattatctgtacaggctgttccgcaagtccaacctgaagccatttgagcgggacatctccaccgagatctaccaggccggctctacaccctgcaacggcgtggagggcttcaattgttattttcccctgcagtcttacggcttccagcctacaaatggcgtgggctatcagccataccgggtggtggtgctgtcttttgagctgctgcacgcaccagcaaccgtgtgcggccccaagaagagcacacatcatcaccaccaccaccaccactga

SEQ ID NO: 5690 - DNA, 735 bp, Artificial Sequence
  Description of Artificial Sequence: Synthetic polynucleotide
atgggcatcctgccaagcccaggaatgcccgccctgctgtctctggtgagcctgctgtccgtgctgctgatgggatgcgtggcagagacaggcacaaggttccctaacatcaccaatctgtgcccattcggcgaggtgtttaacgccacacgctttgcctccgtgtcagcctggaaccggaagagaatctctaattgcgtggccgactatagcgtgctgtacaatagcgcctccttctctacctttaagtgctatggcgtgagccccaccaagctgaacgatctgtgcttcacaaacgtgtacgccgactcctttgtgatccggggcgatgaagtgagacagatcgcaccaggacagaccggaaagatcgcagactacaactataagctgcctgacgatttcacaggctgcgtgatcgcctggaatagcaacaatctggattccaaagtgggcggcaactacaattatctgtacaggctgttccgcaagtccaacctgaagccatttgagcgggacatctccaccgagatctaccaggccggctctacaccctgcaacggcgtggagggcttcaattgttattttcccctgcagtcttacggcttccagcctacaaatggcgtgggctatcagccataccgggtggtggtgctgtcttttgagctgctgcacgcaccagcaaccgtgtgcggccccaagaagagcacacatcatcaccaccaccaccaccactga

SEQ ID NO: 5691 - DNA, 735 bp, Artificial Sequence
  Description of Artificial Sequence: Synthetic polynucleotide
atgggcatcctgccaagcccaggaatgcccgccctgctgtctctggtgagcctgctgtccgtgctgctgatgggatgcgtggcagagacaggcacaaggttccctaacatcaccaatctgtgcccattcggcgaggtgtttaacgccacacgctttgcctccgtgtatgcctggaaccggaagagaatctctaattgcgtggccgactatagcgtgctgtacaatagcgcctccttctctacctttaagtgctatggcgtgagccccaccaagctgaacgatctgtgcttcacaaacgtgtacgccgactcctttgtgatccggggcgatgaagtgagacagatcgcaccaggacagaccggaaagatcgcagactacaactataagctgcctgacgatttcacaggctgcgtgatcgcctggaatagcaacaatctggattccaaagtgggcggcaactacaattatctgtacaggctgttccgcaagtccaacctgaagccatttgagcgggacatctccgatgagatctaccaggccggctctacaccctgcaacggcgtggagggcttcaattgttattttcccctgcagtcttacggcttccagcctacaaatggcgtgggctatcagccataccgggtggtggtgctgtcttttgagctgctgcacgcaccagcaaccgtgtgcggccccaagaagagcacacatcatcaccaccaccaccaccactga

SEQ ID NO: 5692 - DNA, 735 bp, Artificial Sequence
  Description of Artificial Sequence: Synthetic polynucleotide
atgggcatcctgccaagcccaggaatgcccgccctgctgtctctggtgagcctgctgtccgtgctgctgatgggatgcgtggcagagacaggcacaaggttccctaacatcaccaatctgtgcccattcggcgaggtgtttaacgccacacgctttgcctccgtgtatgcctggaaccggaagagaatctctaattgcgtggccgactatagcgtgctgtacaatagcgcctccttctctacctttaagtgctatggcgtgagccccaccaagctgaacgatctgtgcttcacaaacgtgtacgccgactcctttgtgatccggggcgatgaagtgagacagatcgcaccaggacagaccggaaagatcgcagactacaactataagctgcctgacgatttcacaggctgcgtgatcgcctggaatagcaacaatctggattccaaagtgggcggcaactacaattatctgtacaggctgttccgcaagtccaacctgaagccatttgagcgggacatcggtaccgagatctaccaggccggctctacaccctgcaacggcgtggagggcttcaattgttattttcccctgcagtcttacggcttccagcctacaaatggcgtgggctatcagccataccgggtggtggtgctgtcttttgagctgctgcacgcaccagcaaccgtgtgcggccccaagaagagcacacatcatcaccaccaccaccaccactga

SEQ ID NO: 5693 - DNA, 735 bp, Artificial Sequence
  Description of Artificial Sequence: Synthetic polynucleotide
atgggcatcctgccaagcccaggaatgcccgccctgctgtctctggtgagcctgctgtccgtgctgctgatgggatgcgtggcagagacaggcacaaggttccctaacatcaccaatctgtgcccattcggcgaggtgtttaacgccacacgctttgcctccgtgtatgcctggaaccggaagagaatctctaattgcgtggccgactatagcgctctgtacaatagcgcctccttctctacctttaagtgctatggcgtgagccccaccaagctgaacgatctgtgcttcacaaacgtgtacgccgactcctttgtgatccggggcgatgaagtgagacagatcgcaccaggacagaccggaaagatcgcagactacaactataagctgcctgacgatttcacaggctgcgtgatcgcctggaatagcaacaatctggattccaaagtgggcggcaactacaattatctgtacaggctgttccgcaagtccaacctgaagccatttgagcgggacatctccaccgagatctaccaggccggctctacaccctgcaacggcgtggagggcttcaattgttattttcccctgcagtcttacggcttccagcctacaaatggcgtgggctatcagccataccgggtggtggtgctgtcttttgagctgctgcacgcaccagcaaccgtgtgcggccccaagaagagcacacatcatcaccaccaccaccaccactga

SEQ ID NO: 5694 - DNA, 735 bp, Artificial Sequence
  Description of Artificial Sequence: Synthetic polynucleotide
atgggcatcctgccaagcccaggaatgcccgccctgctgtctctggtgagcctgctgtccgtgctgctgatgggatgcgtggcagagacaggcacaaggttccctaacatcaccaatctgtgcccattcggcgaggtgtttaacgccacacgctttgcctccgtgtatgcctggaaccggaagagaatctctaattgcgtggccgactatagcgtgctgtacaatacggcctccttctctacctttaagtgctatggcgtgagccccaccaagctgaacgatctgtgcttcacaaacgtgtacgccgactcctttgtgatccggggcgatgaagtgagacagatcgcaccaggacagaccggaaagatcgcagactacaactataagctgcctgacgatttcacaggctgcgtgatcgcctggaatagcaacaatctggattccaaagtgggcggcaactacaattatctgtacaggctgttccgcaagtccaacctgaagccatttgagcgggacatctccaccgagatctaccaggccggctctacaccctgcaacggcgtggagggcttcaattgttattttcccctgcagtcttacggcttccagcctacaaatggcgtgggctatcagccataccgggtggtggtgctgtcttttgagctgctgcacgcaccagcaaccgtgtgcggccccaagaagagcacacatcatcaccaccaccaccaccactga

SEQ ID NO: 5695 - DNA, 735 bp, Artificial Sequence
  Description of Artificial Sequence: Synthetic polynucleotide
atgggcatcctgccaagcccaggaatgcccgccctgctgtctctggtgagcctgctgtccgtgctgctgatgggatgcgtggcagagacaggcacaaggttccctaacatcaccaatctgtgcccattcggcgaggtgtttaacgccacacgctttgcctccgtgtatgcctggaaccggaagagaatctctaattgcgtggccgactatagcgtgctgtacaatagcgcctccttctctacctttaagtgctatggcgtgagccccaccaagctgaacgatctgtgcgtcacaaacgtgtacgccgactcctttgtgatccggggcgatgaagtgagacagatcgcaccaggacagaccggaaagatcgcagactacaactataagctgcctgacgatttcacaggctgcgtgatcgcctggaatagcaacaatctggattccaaagtgggcggcaactacaattatctgtacaggctgttccgcaagtccaacctgaagccatttgagcgggacatctccaccgagatctaccaggccggctctacaccctgcaacggcgtggagggcttcaattgttattttcccctgcagtcttacggcttccagcctacaaatggcgtgggctatcagccataccgggtggtggtgctgtcttttgagctgctgcacgcaccagcaaccgtgtgcggccccaagaagagcacacatcatcaccaccaccaccaccactga

SEQ ID NO: 5696 - DNA, 735 bp, Artificial Sequence
  Description of Artificial Sequence: Synthetic polynucleotide
atgggcatcctgccaagcccaggaatgcccgccctgctgtctctggtgagcctgctgtccgtgctgctgatgggatgcgtggcagagacaggcacaaggttccctaacatcaccaatctgtgcccattcggcgaggtgtttaacgccacacgctttgcctccgtgtatgcctggaaccggaagagaatctctaattgcgtggccgactatagcgtgctgtacaatagcgcctccttctctacctttaagtgctatggcgtgagccccaccaagctgaacgatctgtgcttcacaaacgtgtacgccgactcctttgtgatccggggcgatgaagtgagacagatcgcaccaggacagaccggaaagatcgcagactacaactataagctgcctgacgatttcacaggctgcgtgatcgcctggaatagcaacaatctggattccaaagtgggcggcaactacaattatctgtacaggctgttccgcaagtccaacctgaagccatttgagcgggacatcgaaaccgagatctaccaggccggctctacaccctgcaacggcgtggagggcttcaattgttattttcccctgcagtcttacggcttccagcctacaaatggcgtgggctatcagccataccgggtggtggtgctgtcttttgagctgctgcacgcaccagcaaccgtgtgcggccccaagaagagcacacatcatcaccaccaccaccaccactga

SEQ ID NO: 5697 - DNA, 735 bp, Artificial Sequence
  Description of Artificial Sequence: Synthetic polynucleotide
atgggcatcctgccaagcccaggaatgcccgccctgctgtctctggtgagcctgctgtccgtgctgctgatgggatgcgtggcagagacaggcacaaggttccctaacatcaccaatctgtgcccattcggcgaggtgtttaacgccacacgctttgcctccgtgtatgcctggaaccggaagagaatctctaattgcgtggccgacctcagcgtgctgtacaatagcgcctccttctctacctttaagtgctatggcgtgagccccaccaagctgaacgatctgtgcttcacaaacgtgtacgccgactcctttgtgatccggggcgatgaagtgagacagatcgcaccaggacagaccggaaagatcgcagactacaactataagctgcctgacgatttcacaggctgcgtgatcgcctggaatagcaacaatctggattccaaagtgggcggcaactacaattatctgtacaggctgttccgcaagtccaacctgaagccatttgagcgggacatctccaccgagatctaccaggccggctctacaccctgcaacggcgtggagggcttcaattgttattttcccctgcagtcttacggcttccagcctacaaatggcgtgggctatcagccataccgggtggtggtgctgtcttttgagctgctgcacgcaccagcaaccgtgtgcggccccaagaagagcacacatcatcaccaccaccaccaccactga

SEQ ID NO: 5698 - DNA, 735 bp, Artificial Sequence
  Description of Artificial Sequence: Synthetic polynucleotide
atgggcatcctgccaagcccaggaatgcccgccctgctgtctctggtgagcctgctgtccgtgctgctgatgggatgcgtggcagagacaggcacaaggttccctgacatcaccaatctgtgcccattcggcgaggtgtttaacgccacacgctttgcctccgtgtatgcctggaaccggaagagaatctctaattgcgtggccgactatagcgtgctgtacaatagcgcctccttctctacctttaagtgctatggcgtgagccccaccaagctgaacgatctgtgcttcacaaacgtgtacgccgactcctttgtgatccggggcgatgaagtgagacagatcgcaccaggacagaccggaaagatcgcagactacaactataagctgcctgacgatttcacaggctgcgtgatcgcctggaatagcaacaatctggattccaaagtgggcggcaactacaattatctgtacaggctgttccgcaagtccaacctgaagccatttgagcgggacatctccaccgagatctaccaggccggctctacaccctgcaacggcgtggagggcttcaattgttattttcccctgcagtcttacggcttccagcctacaaatggcgtgggctatcagccataccgggtggtggtgctgtcttttgagctgctgcacgcaccagcaaccgtgtgcggccccaagaagagcacacatcatcaccaccaccaccaccactga

SEQ ID NO: 5699 - DNA, 735 bp, Artificial Sequence
  Description of Artificial Sequence: Synthetic polynucleotide
atgggcatcctgccaagcccaggaatgcccgccctgctgtctctggtgagcctgctgtccgtgctgctgatgggatgcgtggcagagacaggcacaaggttccctaacatcaccaatctgtgcccattcggcgaggtgtttaacgccacacgctttgcctccgtgtatgcctggaaccggaagagaatctctaattgcgtggccgactatagcgtgctgtacaatagcgcctccttctctacctttaagtgctatggcgtgagccccaccaagctgaacgatctgtgcttcacaaacgtgtacgccgactcctttgtgatccggggcgatgaagtgagacagatcgcaccaggacagaccggaaagatcgcagactacaactataagctgcctgacgatttcacaggctgcgtgatcgcctggaatagcaacaatctggattccaaagtgggcggcaactacaattatctgtacaggctgttccgcaagtccaacctgaagccatttgagcgggacatctccaccgagatctaccaggccggctctacaccctgcaacggcgtggagggcttcaattgttattttcccctgcagtcttacggcttccagcctacaaatggcgtgaaatatcagccataccgggtggtggtgctgtcttttgagctgctgcacgcaccagcaaccgtgtgcggccccaagaagagcacacatcatcaccaccaccaccaccactga

SEQ ID NO: 5700 - DNA, 735 bp, Artificial Sequence
  Description of Artificial Sequence: Synthetic polynucleotide
atgggcatcctgccaagcccaggaatgcccgccctgctgtctctggtgagcctgctgtccgtgctgctgatgggatgcgtggcagagacaggcacaaggttccctaacatcaccaatctgtgcccattcggcgaggtgtttaacgccacacgctttgcctccgtgtatgcctggaaccggaagagaatctctaattgcgtggccgactatagcgtgctgtacaatagcgcctccttctctacctttaagtgctatggcgtgagccccaccaagctgaacgatctgtgcttcacaaacgtgtacgccgactcctttgtgatccggggcgatgaagtgagacagatcgcaccaggacagaccggaaagatcgcagactacaactataagctgcctgacgatttcacaggctgcgtgatcgcctggaatagcaacaatctggattccaaagtgggcggcaactacaattatctgtacaggctgttccgcaagtccaacctgaagccatttgagcgggacatctccaccgagtggtaccaggccggctctacaccctgcaacggcgtggagggcttcaattgttattttcccctgcagtcttacggcttccagcctacaaatggcgtgggctatcagccataccgggtggtggtgctgtcttttgagctgctgcacgcaccagcaaccgtgtgcggccccaagaagagcacacatcatcaccaccaccaccaccactga

SEQ ID NO: 5701 - DNA, 735 bp, Artificial Sequence
  Description of Artificial Sequence: Synthetic polynucleotide
atgggcatcctgccaagcccaggaatgcccgccctgctgtctctggtgagcctgctgtccgtgctgctgatgggatgcgtggcagagacaggcacaaggttccctaacatcaccaatctgtgcccattcggcgaggtgtttaacgccacacgctttgcctccgtgtatgcctggaaccggaagagaatctctaattgcgtggccgactatagcgtgctgtacaatagcgcctccttctctacctttaagtgctatggcgtgagccccaccaagctgaacgatctgtgcttcacaaacgtgtacgccgactcctttgtgatccggggcgatgaagtgagacagatcgcaccaggacagaccggaaagatcgcagactacaactataagctgcctgacgatttcacaggctgcgtgatcgcctggaatagcaacaatctggattccaaagtgggcggcaactacaattatctgtacaggctgttccgcaagtccaacctgcgtccatttgagcgggacatctccaccgagatctaccaggccggctctacaccctgcaacggcgtggagggcttcaattgttattttcccctgcagtcttacggcttccagcctacaaatggcgtgggctatcagccataccgggtggtggtgctgtcttttgagctgctgcacgcaccagcaaccgtgtgcggccccaagaagagcacacatcatcaccaccaccaccaccactga

SEQ ID NO: 5702 - DNA, 735 bp, Artificial Sequence
  Description of Artificial Sequence: Synthetic polynucleotide
atgggcatcctgccaagcccaggaatgcccgccctgctgtctctggtgagcctgctgtccgtgctgctgatgggatgcgtggcagagacaggcacaaggttccctaacatcaccaatctgtgcccattcggcgaggtgtttaacgccacacgctttgcctccgtgtatgcccccaaccggaagagaatctctaattgcgtggccgactatagcgtgctgtacaatagcgcctccttctctacctttaagtgctatggcgtgagccccaccaagctgaacgatctgtgcttcacaaacgtgtacgccgactcctttgtgatccggggcgatgaagtgagacagatcgcaccaggacagaccggaaagatcgcagactacaactataagctgcctgacgatttcacaggctgcgtgatcgcctggaatagcaacaatctggattccaaagtgggcggcaactacaattatctgtacaggctgttccgcaagtccaacctgaagccatttgagcgggacatctccaccgagatctaccaggccggctctacaccctgcaacggcgtggagggcttcaattgttattttcccctgcagtcttacggcttccagcctacaaatggcgtgggctatcagccataccgggtggtggtgctgtcttttgagctgctgcacgcaccagcaaccgtgtgcggccccaagaagagcacacatcatcaccaccaccaccaccactga

SEQ ID NO: 5703 - DNA, 735 bp, Artificial Sequence
  Description of Artificial Sequence: Synthetic polynucleotide
atgggcatcctgccaagcccaggaatgcccgccctgctgtctctggtgagcctgctgtccgtgctgctgatgggatgcgtggcagagacaggcacaaggttccctaacatcaccaatctgtgcccattcggcgaggtgtttaacgccacacgctttgcctccgtgtatgcctggaaccggaagagaatctctaattgcgtggccgactatagcgtgctgtacaatagcgcctccttctctacctttaagtgctatggcgtgagccccaccaagctgaacgatctgtgcttcacaaacgtgtacgccgactcctttgtgatccggggcgatgaagtgagacagatcgcaccaggacagaccggaaagatcgcagactacaactataagctgcctgacgatttcacaggctgcgtgatcgcctggaatagcaacaatctggattccaaagtgggcggcaactacaattatctgtacaggctgttccgcaagtccaacctgaagccatttgagaatgacatctccaccgagatctaccaggccggctctacaccctgcaacggcgtggagggcttcaattgttattttcccctgcagtcttacggcttccagcctacaaatggcgtgggctatcagccataccgggtggtggtgctgtcttttgagctgctgcacgcaccagcaaccgtgtgcggccccaagaagagcacacatcatcaccaccaccaccaccactga

SEQ ID NO: 5704 - DNA, 735 bp, Artificial Sequence
  Description of Artificial Sequence: Synthetic polynucleotide
atgggcatcctgccaagcccaggaatgcccgccctgctgtctctggtgagcctgctgtccgtgctgctgatgggatgcgtggcagagacaggcacaaggttccctaacatcaccaatctgtgcccattcggcgaggtgtttaacgccacacgctttgcctccgtgtatgcctggaaccggaagagaatctctaattgcactgccgactatagcgtgctgtacaatagcgcctccttctctacctttaagtgctatggcgtgagccccaccaagctgaacgatctgtgcttcacaaacgtgtacgccgactcctttgtgatccggggcgatgaagtgagacagatcgcaccaggacagaccggaaagatcgcagactacaactataagctgcctgacgatttcacaggctgcgtgatcgcctggaatagcaacaatctggattccaaagtgggcggcaactacaattatctgtacaggctgttccgcaagtccaacctgaagccatttgagcgggacatctccaccgagatctaccaggccggctctacaccctgcaacggcgtggagggcttcaattgttattttcccctgcagtcttacggcttccagcctacaaatggcgtgggctatcagccataccgggtggtggtgctgtcttttgagctgctgcacgcaccagcaaccgtgtgcggccccaagaagagcacacatcatcaccaccaccaccaccactga

SEQ ID NO: 5705 - DNA, 735 bp, Artificial Sequence
  Description of Artificial Sequence: Synthetic polynucleotide
atgggcatcctgccaagcccaggaatgcccgccctgctgtctctggtgagcctgctgtccgtgctgctgatgggatgcgtggcagagacaggcacaaggttccctaacatcaccaatctgtgcccattcggcgaggtgtttaacgccacacgctttgcctccgtgtatgcctggaaccggaagagaatctctaattgcgtggccgactatagcgtgctgtacaatagcgcctccttctctacctttaagtgctatggcgtgagccccaccaagctgaacgatctgtgcttcacaaacgtgtacgccgactcctttgtgatccggggcgatgaagtgagacagatcgcaccaggacagaccggaaagatcgcagactacaactataagctgcctgacgatttcacaggctgcgtgatcgcctggaatagcaacaatctggattccaaagtgggcggcaactacaattatctgtacaggctgttccgcaagtccaacctgaagccatttgaggtcgacatctccaccgagatctaccaggccggctctacaccctgcaacggcgtggagggcttcaattgttattttcccctgcagtcttacggcttccagcctacaaatggcgtgggctatcagccataccgggtggtggtgctgtcttttgagctgctgcacgcaccagcaaccgtgtgcggccccaagaagagcacacatcatcaccaccaccaccaccactga

SEQ ID NO: 5706 - DNA, 735 bp, Artificial Sequence
  Description of Artificial Sequence: Synthetic polynucleotide
atgggcatcctgccaagcccaggaatgcccgccctgctgtctctggtgagcctgctgtccgtgctgctgatgggatgcgtggcagagacaggcacaaggttccctgcgatcaccaatctgtgcccattcggcgaggtgtttaacgccacacgctttgcctccgtgtatgcctggaaccggaagagaatctctaattgcgtggccgactatagcgtgctgtacaatagcgcctccttctctacctttaagtgctatggcgtgagccccaccaagctgaacgatctgtgcttcacaaacgtgtacgccgactcctttgtgatccggggcgatgaagtgagacagatcgcaccaggacagaccggaaagatcgcagactacaactataagctgcctgacgatttcacaggctgcgtgatcgcctggaatagcaacaatctggattccaaagtgggcggcaactacaattatctgtacaggctgttccgcaagtccaacctgaagccatttgagcgggacatctccaccgagatctaccaggccggctctacaccctgcaacggcgtggagggcttcaattgttattttcccctgcagtcttacggcttccagcctacaaatggcgtgggctatcagccataccgggtggtggtgctgtcttttgagctgctgcacgcaccagcaaccgtgtgcggccccaagaagagcacacatcatcaccaccaccaccaccactga

SEQ ID NO: 5707 - DNA, 735 bp, Artificial Sequence
  Description of Artificial Sequence: Synthetic polynucleotide
atgggcatcctgccaagcccaggaatgcccgccctgctgtctctggtgagcctgctgtccgtgctgctgatgggatgcgtggcagagacaggcacaaggttccctaacatcaccaatctgtgcccattcggcgaggtgtttaacgccacacgctttgcctccgtgtatgcctggaaccggaagagaatctctaattgcgtggccgactatagcgtgctgtacaatagcgcctccttctctacctttaagtgctatggcgtgagccccaccaagctgaacgatctgtgcttcacaaacgtgtacgccgactcctttgtgatccggggcgatgaagtgagacagatcgcaccaggacagaccggaaagatcgcagactacaactataagctgcctgacgatttcacaggctgcgtgatcgcctggaatagcaacaatctggattccaaagtgggcggcaactacaattatctgtacaggctgttccgcaagtccaacctgaagccatttgagcgggacatctccaccgagatctaccaggccggctctacaccctgcaacggcgtggagggcttcaattgttattttcccctgcagtcttacggcttccagcctacaaatggcgtgggctatcagccataccgggtggtggtgctgtcttttgagctgctgtttgcaccagcaaccgtgtgcggccccaagaagagcacacatcatcaccaccaccaccaccactga

SEQ ID NO: 5708 - DNA, 735 bp, Artificial Sequence
  Description of Artificial Sequence: Synthetic polynucleotide
atgggcatcctgccaagcccaggaatgcccgccctgctgtctctggtgagcctgctgtccgtgctgctgatgggatgcgtggcagagacaggcacaaggttccctaacatcaccaatctgtgcccattcggcgaggtgtttaacgccacacgctttgcctccgtgtatgcctggaaccggaagagaatctctaattgcgtggccgactatagcgtgctgtacaatagcgcctccttctcttcatttaagtgctatggcgtgagccccaccaagctgaacgatctgtgcttcacaaacgtgtacgccgactcctttgtgatccggggcgatgaagtgagacagatcgcaccaggacagaccggaaagatcgcagactacaactataagctgcctgacgatttcacaggctgcgtgatcgcctggaatagcaacaatctggattccaaagtgggcggcaactacaattatctgtacaggctgttccgcaagtccaacctgaagccatttgagcgggacatctccaccgagatctaccaggccggctctacaccctgcaacggcgtggagggcttcaattgttattttcccctgcagtcttacggcttccagcctacaaatggcgtgggctatcagccataccgggtggtggtgctgtcttttgagctgctgcacgcaccagcaaccgtgtgcggccccaagaagagcacacatcatcaccaccaccaccaccactga

SEQ ID NO: 5709 - DNA, 735 bp, Artificial Sequence
  Description of Artificial Sequence: Synthetic polynucleotide
atgggcatcctgccaagcccaggaatgcccgccctgctgtctctggtgagcctgctgtccgtgctgctgatgggatgcgtggcagagacaggcacaaggttccctaacatcaccaatctgtgcccattcggcgagtattttaacgccacacgctttgcctccgtgtatgcctggaaccggaagagaatctctaattgcgtggccgactatagcgtgctgtacaatagcgcctccttctctacctttaagtgctatggcgtgagccccaccaagctgaacgatctgtgcttcacaaacgtgtacgccgactcctttgtgatccggggcgatgaagtgagacagatcgcaccaggacagaccggaaagatcgcagactacaactataagctgcctgacgatttcacaggctgcgtgatcgcctggaatagcaacaatctggattccaaagtgggcggcaactacaattatctgtacaggctgttccgcaagtccaacctgaagccatttgagcgggacatctccaccgagatctaccaggccggctctacaccctgcaacggcgtggagggcttcaattgttattttcccctgcagtcttacggcttccagcctacaaatggcgtgggctatcagccataccgggtggtggtgctgtcttttgagctgctgcacgcaccagcaaccgtgtgcggccccaagaagagcacacatcatcaccaccaccaccaccactga

SEQ ID NO: 5710 - DNA, 735 bp, Artificial Sequence
  Description of Artificial Sequence: Synthetic polynucleotide
atgggcatcctgccaagcccaggaatgcccgccctgctgtctctggtgagcctgctgtccgtgctgctgatgggatgcgtggcagagacaggcacaaggttccctaacatcaccaatctgtgcccaatgggcgaggtgtttaacgccacacgctttgcctccgtgtatgcctggaaccggaagagaatctctaattgcgtggccgactatagcgtgctgtacaatagcgcctccttctctacctttaagtgctatggcgtgagccccaccaagctgaacgatctgtgcttcacaaacgtgtacgccgactcctttgtgatccggggcgatgaagtgagacagatcgcaccaggacagaccggaaagatcgcagactacaactataagctgcctgacgatttcacaggctgcgtgatcgcctggaatagcaacaatctggattccaaagtgggcggcaactacaattatctgtacaggctgttccgcaagtccaacctgaagccatttgagcgggacatctccaccgagatctaccaggccggctctacaccctgcaacggcgtggagggcttcaattgttattttcccctgcagtcttacggcttccagcctacaaatggcgtgggctatcagccataccgggtggtggtgctgtcttttgagctgctgcacgcaccagcaaccgtgtgcggccccaagaagagcacacatcatcaccaccaccaccaccactga

SEQ ID NO: 5711 - DNA, 735 bp, Artificial Sequence
  Description of Artificial Sequence: Synthetic polynucleotide
atgggcatcctgccaagcccaggaatgcccgccctgctgtctctggtgagcctgctgtccgtgctgctgatgggatgcgtggcagagacaggcacaaggttccctcgcatcaccaatctgtgcccattcggcgaggtgtttaacgccacacgctttgcctccgtgtatgcctggaaccggaagagaatctctaattgcgtggccgactatagcgtgctgtacaatagcgcctccttctctacctttaagtgctatggcgtgagccccaccaagctgaacgatctgtgcttcacaaacgtgtacgccgactcctttgtgatccggggcgatgaagtgagacagatcgcaccaggacagaccggaaagatcgcagactacaactataagctgcctgacgatttcacaggctgcgtgatcgcctggaatagcaacaatctggattccaaagtgggcggcaactacaattatctgtacaggctgttccgcaagtccaacctgaagccatttgagcgggacatctccaccgagatctaccaggccggctctacaccctgcaacggcgtggagggcttcaattgttattttcccctgcagtcttacggcttccagcctacaaatggcgtgggctatcagccataccgggtggtggtgctgtcttttgagctgctgcacgcaccagcaaccgtgtgcggccccaagaagagcacacatcatcaccaccaccaccaccactga

SEQ ID NO: 5712 - DNA, 735 bp, Artificial Sequence
  Description of Artificial Sequence: Synthetic polynucleotide
atgggcatcctgccaagcccaggaatgcccgccctgctgtctctggtgagcctgctgtccgtgctgctgatgggatgcgtggcagagacaggcacaaggttccctaacatcaccaatctgtgcccattcggcgaggtgtttaacgccacacgctttgcctccgtgtatgcctggaaccggaagagaatctctaattgcgtggccgactatagcgtgctgtacaatagcgcctccttctctacctttaagtgctatggcgtgagccccaccaagctgaacgatctgtgcttcacaaacgtgtacgccgactcctttgtgatccggggcgatgaagtgagacagatcgcaccaggacagaccggaaagatcgcagactacaactataagctgcctgacgatttcacaggctgcgtgatcgcctggaatagcaacaatctggattccaaaattggcggcaactacaattatctgtacaggctgttccgcaagtccaacctgaagccatttgagcgggacatctccaccgagatctaccaggccggctctacaccctgcaacggcgtggagggcttcaattgttattttcccctgcagtcttacggcttccagcctacaaatggcgtgggctatcagccataccgggtggtggtgctgtcttttgagctgctgcacgcaccagcaaccgtgtgcggccccaagaagagcacacatcatcaccaccaccaccaccactga

SEQ ID NO: 5713 - DNA, 735 bp, Artificial Sequence
  Description of Artificial Sequence: Synthetic polynucleotide
atgggcatcctgccaagcccaggaatgcccgccctgctgtctctggtgagcctgctgtccgtgctgctgatgggatgcgtggcagagacaggcacaaggttccctaacatcaccaatctgtgcccattcggcgaggtgtttaacgccacacgctttgcctccgtgtatgcctggaaccggaagagaatctctaattgcgtggccgactatagcgtgctgtacaatagcgcctccttctctacctttaagtgctatggcgtgagccccaccaagctgaacgatctgtgcttcacaactgtgtacgccgactcctttgtgatccggggcgatgaagtgagacagatcgcaccaggacagaccggaaagatcgcagactacaactataagctgcctgacgatttcacaggctgcgtgatcgcctggaatagcaacaatctggattccaaagtgggcggcaactacaattatctgtacaggctgttccgcaagtccaacctgaagccatttgagcgggacatctccaccgagatctaccaggccggctctacaccctgcaacggcgtggagggcttcaattgttattttcccctgcagtcttacggcttccagcctacaaatggcgtgggctatcagccataccgggtggtggtgctgtcttttgagctgctgcacgcaccagcaaccgtgtgcggccccaagaagagcacacatcatcaccaccaccaccaccactga

SEQ ID NO: 5714 - DNA, 735 bp, Artificial Sequence
  Description of Artificial Sequence: Synthetic polynucleotide
atgggcatcctgccaagcccaggaatgcccgccctgctgtctctggtgagcctgctgtccgtgctgctgatgggatgcgtggcagagacaggcacaaggttccctaacatcaccaatctgtgcccattcggcgaggtgtttaacgccacacgctttgcctccgtgtatgcctggaaccggaagagaatctctaattgcgtggccgactatagcgtgctgtacaatagcgcctccttctctacctttaagtgctatggcgtgagccccaccaagctgaacgatctgtgcttcacaaacgtgtacgccgactcctttgtgatccggggcgatgaagtgagacagatcgcaccaggacagaccggaaagatcgcagactacaactataagctgcctgacgatttcacaggctgcgtgatcgcctggaatagcaacaatctggattccaaagtgggcggcaactacaattatctgtacaggctgttccgcaagtccaacctgaagccatttgagcgggacatctcccaagagatctaccaggccggctctacaccctgcaacggcgtggagggcttcaattgttattttcccctgcagtcttacggcttccagcctacaaatggcgtgggctatcagccataccgggtggtggtgctgtcttttgagctgctgcacgcaccagcaaccgtgtgcggccccaagaagagcacacatcatcaccaccaccaccaccactga

SEQ ID NO: 5715 - DNA, 735 bp, Artificial Sequence
  Description of Artificial Sequence: Synthetic polynucleotide
atgggcatcctgccaagcccaggaatgcccgccctgctgtctctggtgagcctgctgtccgtgctgctgatgggatgcgtggcagagacaggcacaaggttccctaacatcaccaatctgtgcccattcggcgaggtgtttaacgccacacgctttgcctccgtgtatgcctggaaccggaagagaatctctaattgcgtggccgactatagcgtgctgtacaatagcgcctccttctctacctttaagtgctatggcgtgagccccaccaagctgaacgatctgtgcttcacaaacgtgtacgccgactcctttgtgatccggggcgatgaagtgagacagatcgcaccaggacagaccggaaagatcgcagactacaactataagctgcctgacgatttcacaggctgcgtgatcgcctggaatagcaacaatctggattccaaagtgggcggcaactacaattatctgtacaggctgttccgcaagtccaacctgaagccagtagagcgggacatctccaccgagatctaccaggccggctctacaccctgcaacggcgtggagggcttcaattgttattttcccctgcagtcttacggcttccagcctacaaatggcgtgggctatcagccataccgggtggtggtgctgtcttttgagctgctgcacgcaccagcaaccgtgtgcggccccaagaagagcacacatcatcaccaccaccaccaccactga

SEQ ID NO: 5716 - DNA, 735 bp, Artificial Sequence
  Description of Artificial Sequence: Synthetic polynucleotide
atgggcatcctgccaagcccaggaatgcccgccctgctgtctctggtgagcctgctgtccgtgctgctgatgggatgcgtggcagagacaggcacaaggttccctaacatcaccaatctgtgcccattcggcgaggtgtttaacgccacacgctttgcctccgtgtatgcctggaaccggaagagaatctctaattgcgtggccgactatagcgtgctgtacaatagcgcctccttctctacctttaagtgctatggcgtgagccccaccaagctgaacgatctgtgcttcacaaacgtgtacgccgactcctttgtgatccggggcgatgaagtgagacagatcgcaccaggacagaccggaaagatcgcagactacaactataagctgcctgacgatttcacaggctgcgtgatcgcctggaatagcaacggtctggattccaaagtgggcggcaactacaattatctgtacaggctgttccgcaagtccaacctgaagccatttgagcgggacatctccaccgagatctaccaggccggctctacaccctgcaacggcgtggagggcttcaattgttattttcccctgcagtcttacggcttccagcctacaaatggcgtgggctatcagccataccgggtggtggtgctgtcttttgagctgctgcacgcaccagcaaccgtgtgcggccccaagaagagcacacatcatcaccaccaccaccaccactga

SEQ ID NO: 5717 - DNA, 735 bp, Artificial Sequence
  Description of Artificial Sequence: Synthetic polynucleotide
atgggcatcctgccaagcccaggaatgcccgccctgctgtctctggtgagcctgctgtccgtgctgctgatgggatgcgtggcagagacaggcacaaggttccctaacatcaccaatctgtgcccattcggcgaggtgtttaacgccacacgctttgcctccgtgtatgcctggaaccggaagagaatctctaattgcgtggccgactatagcgtgctgtacaatagcgcctccttctctacctttaagtgctatggcgtgagccccaccaagctgaacgatctgtgcttcacaaacgtgtacgccgactcctttgtgatccggggcgatgaagtgagacagatcgcaccaggacagaccggaaagatcgcagactacaactataagctgcctgacgatttcacaggctgcgtgatcgcctggaatagcaacaatctggattccaaagtgggcggcaactacaattatctgtacaggctgttccgcaagtccaacctgaagccatttgagcgggacatctccaccgagatctaccaggccggctctacaccctgcacgggcgtggagggcttcaattgttattttcccctgcagtcttacggcttccagcctacaaatggcgtgggctatcagccataccgggtggtggtgctgtcttttgagctgctgcacgcaccagcaaccgtgtgcggccccaagaagagcacacatcatcaccaccaccaccaccactga

SEQ ID NO: 5718 - DNA, 735 bp, Artificial Sequence
  Description of Artificial Sequence: Synthetic polynucleotide
atgggcatcctgccaagcccaggaatgcccgccctgctgtctctggtgagcctgctgtccgtgctgctgatgggatgcgtggcagagacaggcacaaggttccctaacatcaccaatctgtgcccattcggcgaggtgtttaacgccacacgctttgcctccgtgtatgcctggaaccggaagagaatctctaattgcgtggccgactatagccttctgtacaatagcgcctccttctctacctttaagtgctatggcgtgagccccaccaagctgaacgatctgtgcttcacaaacgtgtacgccgactcctttgtgatccggggcgatgaagtgagacagatcgcaccaggacagaccggaaagatcgcagactacaactataagctgcctgacgatttcacaggctgcgtgatcgcctggaatagcaacaatctggattccaaagtgggcggcaactacaattatctgtacaggctgttccgcaagtccaacctgaagccatttgagcgggacatctccaccgagatctaccaggccggctctacaccctgcaacggcgtggagggcttcaattgttattttcccctgcagtcttacggcttccagcctacaaatggcgtgggctatcagccataccgggtggtggtgctgtcttttgagctgctgcacgcaccagcaaccgtgtgcggccccaagaagagcacacatcatcaccaccaccaccaccactga

SEQ ID NO: 5719 - DNA, 735 bp, Artificial Sequence
  Description of Artificial Sequence: Synthetic polynucleotide
atgggcatcctgccaagcccaggaatgcccgccctgctgtctctggtgagcctgctgtccgtgctgctgatgggatgcgtggcagagacaggcacaaggttccctaacatcaccaatctgtgcccattcggcgaggtgtttaacgccacacgctttgcctccgtgtatgcctggaaccggaagagaatctctaattgcgtggccgactatagcgtgctgtacaatagcgcctccttctctacctttaagtgctatggcgtgagccccaccaagctgaacgatctgtgcttcacaaacgtgtacgccgactcctttgtgatccggggcgatgaagtgagacagatcgcaccaggacagaccggaaagatcgcagactacaactataagctgcctgacgatttcacaggctgcgtgatcgcctggaatagcaacaatctggattccaaagtgggcggcaactacaattatctgtacaggctgttccgcaagtccaacctgaagccatttgagcgggacatctccaccgagatctaccaggccggctctacaccctgcaacggcgtggagggcttcaattgttattttcccctgcagtcttacggcttccagcctacaaatggcgtgggctatcagccataccgggtggtggtgctgttgtttgagctgctgcacgcaccagcaaccgtgtgcggccccaagaagagcacacatcatcaccaccaccaccaccactga

SEQ ID NO: 5720 - DNA, 735 bp, Artificial Sequence
  Description of Artificial Sequence: Synthetic polynucleotide
atgggcatcctgccaagcccaggaatgcccgccctgctgtctctggtgagcctgctgtccgtgctgctgatgggatgcgtggcagagacaggcacaaggttccctaacatcaccaatctgtgcccattcggcgaggtgtttaacgccacacgctttgcctccgtgtatgcctacaaccggaagagaatctctaattgcgtggccgactatagcgtgctgtacaatagcgcctccttctctacctttaagtgctatggcgtgagccccaccaagctgaacgatctgtgcttcacaaacgtgtacgccgactcctttgtgatccggggcgatgaagtgagacagatcgcaccaggacagaccggaaagatcgcagactacaactataagctgcctgacgatttcacaggctgcgtgatcgcctggaatagcaacaatctggattccaaagtgggcggcaactacaattatctgtacaggctgttccgcaagtccaacctgaagccatttgagcgggacatctccaccgagatctaccaggccggctctacaccctgcaacggcgtggagggcttcaattgttattttcccctgcagtcttacggcttccagcctacaaatggcgtgggctatcagccataccgggtggtggtgctgtcttttgagctgctgcacgcaccagcaaccgtgtgcggccccaagaagagcacacatcatcaccaccaccaccaccactga

SEQ ID NO: 5721 - DNA, 735 bp, Artificial Sequence
  Description of Artificial Sequence: Synthetic polynucleotide
atgggcatcctgccaagcccaggaatgcccgccctgctgtctctggtgagcctgctgtccgtgctgctgatgggatgcgtggcagagacaggcacaaggttccctaacatcaccaatctgtgcccattcggcgaggtgtttaacgccacacgctttgcctccgtgtatgcctggaaccggaagagaatctctaattgcgtggccgactatagcgtgctgtacaatagcgcctccttctctacctttaagtgctatggcgtgagccccaccaagctgaacgatctgtgcttcacaaacgtgtacgccgactcctttgtgatccggggcgatgaagtgagacagatcgcaccaggacagaccggaaagatcgcagactacaactataagctgcctgacgatttcacaggctgcgtgatcgcctggaatagcaacaatctggattccaaagtgggcggcaactacaattatctgtacaggctgttccgcaagtccaacctgaagccatttgagcgggacatctccccggagatctaccaggccggctctacaccctgcaacggcgtggagggcttcaattgttattttcccctgcagtcttacggcttccagcctacaaatggcgtgggctatcagccataccgggtggtggtgctgtcttttgagctgctgcacgcaccagcaaccgtgtgcggccccaagaagagcacacatcatcaccaccaccaccaccactga

SEQ ID NO: 5722 - DNA, 735 bp, Artificial Sequence
  Description of Artificial Sequence: Synthetic polynucleotide
atgggcatcctgccaagcccaggaatgcccgccctgctgtctctggtgagcctgctgtccgtgctgctgatgggatgcgtggcagagacaggcacaaggttccctaacatcaccaatctgtgcccattcggcgaggtgtttaacgccacacgctttgcctccgtgtatgcctggaaccggaagagaatctctaattgcgtggccgactatagcgtgctgtacaatagcgcctccttctctacctttaagtgctatggcgtgagccccaccaagctgaacgatctgtgcttcacaaacgtgtacgccgactcctttgtgatccggggcgatgaacttagacagatcgcaccaggacagaccggaaagatcgcagactacaactataagctgcctgacgatttcacaggctgcgtgatcgcctggaatagcaacaatctggattccaaagtgggcggcaactacaattatctgtacaggctgttccgcaagtccaacctgaagccatttgagcgggacatctccaccgagatctaccaggccggctctacaccctgcaacggcgtggagggcttcaattgttattttcccctgcagtcttacggcttccagcctacaaatggcgtgggctatcagccataccgggtggtggtgctgtcttttgagctgctgcacgcaccagcaaccgtgtgcggccccaagaagagcacacatcatcaccaccaccaccaccactga

SEQ ID NO: 5723 - DNA, 735 bp, Artificial Sequence
  Description of Artificial Sequence: Synthetic polynucleotide
atgggcatcctgccaagcccaggaatgcccgccctgctgtctctggtgagcctgctgtccgtgctgctgatgggatgcgtggcagagacaggcacaaggttccctaacatcaccaatctgtgcccattcggcgaggtgtttaacgccacacgctttgcctccgtgtatgcctggaaccggaagagaatctctaattgcgtggccgactatagcgtgctgtacaatagcgcctccttctctacctttaagtgctatggcgtgagccccaccaagctgaacgatctgtgcttcacaaacgtgtacgccgactcctttgtgatccggggcgatgaagtgagacagatcgcaccaggacagaccggaaagatcgcagactacaactataagctgcctgacgatttcacaggctgcgtgatcgcctggaatagcaacaatctggattccaaagtgggcggcaactacaattatctgtacaggctgttccgcaagtccaacctgaagccatttgagcgggacatctccaccgagatctaccaggccggctctacaccctgcaacggcgtggagggcttcaattgttattttcccctgcagtcttacggcttccagcctacaaatggcgtgggctatcagccataccgggtggtggtgctgcaatttgagctgctgcacgcaccagcaaccgtgtgcggccccaagaagagcacacatcatcaccaccaccaccaccactga

SEQ ID NO: 5724 - DNA, 735 bp, Artificial Sequence
  Description of Artificial Sequence: Synthetic polynucleotide
atgggcatcctgccaagcccaggaatgcccgccctgctgtctctggtgagcctgctgtccgtgctgctgatgggatgcgtggcagagacaggcacaaggttccctaacatcaccaatctgtgcccattcggcgaggtgtttaacgccacacgctttgtatccgtgtatgcctggaaccggaagagaatctctaattgcgtggccgactatagcgtgctgtacaatagcgcctccttctctacctttaagtgctatggcgtgagccccaccaagctgaacgatctgtgcttcacaaacgtgtacgccgactcctttgtgatccggggcgatgaagtgagacagatcgcaccaggacagaccggaaagatcgcagactacaactataagctgcctgacgatttcacaggctgcgtgatcgcctggaatagcaacaatctggattccaaagtgggcggcaactacaattatctgtacaggctgttccgcaagtccaacctgaagccatttgagcgggacatctccaccgagatctaccaggccggctctacaccctgcaacggcgtggagggcttcaattgttattttcccctgcagtcttacggcttccagcctacaaatggcgtgggctatcagccataccgggtggtggtgctgtcttttgagctgctgcacgcaccagcaaccgtgtgcggccccaagaagagcacacatcatcaccaccaccaccaccactga

SEQ ID NO: 5725 - DNA, 735 bp, Artificial Sequence
  Description of Artificial Sequence: Synthetic polynucleotide
atgggcatcctgccaagcccaggaatgcccgccctgctgtctctggtgagcctgctgtccgtgctgctgatgggatgcgtggcagagacaggcacaaggttccctaacatcaccaatctgtgcccattcggcgaggtgtttaacgccacacgctttgcctccgtgtatgcctggaaccggaagagaatctctaattgcgtggccgactatagccgactgtacaatagcgcctccttctctacctttaagtgctatggcgtgagccccaccaagctgaacgatctgtgcttcacaaacgtgtacgccgactcctttgtgatccggggcgatgaagtgagacagatcgcaccaggacagaccggaaagatcgcagactacaactataagctgcctgacgatttcacaggctgcgtgatcgcctggaatagcaacaatctggattccaaagtgggcggcaactacaattatctgtacaggctgttccgcaagtccaacctgaagccatttgagcgggacatctccaccgagatctaccaggccggctctacaccctgcaacggcgtggagggcttcaattgttattttcccctgcagtcttacggcttccagcctacaaatggcgtgggctatcagccataccgggtggtggtgctgtcttttgagctgctgcacgcaccagcaaccgtgtgcggccccaagaagagcacacatcatcaccaccaccaccaccactga

SEQ ID NO: 5726 - DNA, 735 bp, Artificial Sequence
  Description of Artificial Sequence: Synthetic polynucleotide
atgggcatcctgccaagcccaggaatgcccgccctgctgtctctggtgagcctgctgtccgtgctgctgatgggatgcgtggcagagacaggcacaaggttccctaacatcaccaatctgtgcccattcggcgaggtgtttaacgccacacgctttgcctccgtgtatgcctggaaccggaagagaatctctaattgcgtggccgactatagcgtgctgtacaatagcgcctccttctctacctttaagtgctatggcgtgagccccaccaagctgaacgatctgtgcttcacaaacgtgtacgccgactcctttgtgatccggggcgatgaagtgagacagatcgcaccaggacagaccggaaagatcgcagactacaactataagctgcctgacgatttcacaggctgcgtgatcgcctggaatagcaacaatctggattccaaagtgggcggcaactacaattatctgtacaggctgttccgcaagtccaacctgaagccatttgagcgggacatctccaccgagatctaccaggccggctctacaccctgcaacggcgtggagggcttcaatgaatattttcccctgcagtcttacggcttccagcctacaaatggcgtgggctatcagccataccgggtggtggtgctgtcttttgagctgctgcacgcaccagcaaccgtgtgcggccccaagaagagcacacatcatcaccaccaccaccaccactga

SEQ ID NO: 5727 - DNA, 735 bp, Artificial Sequence
  Description of Artificial Sequence: Synthetic polynucleotide
atgggcatcctgccaagcccaggaatgcccgccctgctgtctctggtgagcctgctgtccgtgctgctgatgggatgcgtggcagagacaggcacaaggttccctaacatcaccaatctgtgcccattcggcgaggtgtttaacgccacacgctttgcctccgtgtatgcctggaaccggaagagaatctctaattgcgtggccgactatagcgtgctgtacaatagcgcctccttctctacctttaagtgctatggcgtgagccccaccaagctgaacgatctgtgcttcacaaacgtgtacgccgactcctttgtgatccggggcgatgaagtgagacagatcgcaccaggacagaccggaaagatcgcagactacaactataagctgcctgacgatttcacaggctgcgtgatcgcctggaatagcaacaatctggattccaaagtgggcggcaactacaattatctgcgaaggctgttccgcaagtccaacctgaagccatttgagcgggacatctccaccgagatctaccaggccggctctacaccctgcaacggcgtggagggcttcaattgttattttcccctgcagtcttacggcttccagcctacaaatggcgtgggctatcagccataccgggtggtggtgctgtcttttgagctgctgcacgcaccagcaaccgtgtgcggccccaagaagagcacacatcatcaccaccaccaccaccactga

SEQ ID NO: 5728 - DNA, 735 bp, Artificial Sequence
  Description of Artificial Sequence: Synthetic polynucleotide
atgggcatcctgccaagcccaggaatgcccgccctgctgtctctggtgagcctgctgtccgtgctgctgatgggatgcgtggcagagacaggcacaaggttccctaacatcaccaatctgtgcccattcggcgaggtgtttaacgccacacgctttgcctccgtgtatgcctggaaccggaagagaatctctaattgcgtggccgactatagcgtgctgtacaatagcgcctccttctctacctttaagtgctatggcgtgagccccaccaagctgaacgatctgtgcttcacaaacgtgtacgccgactcctttgtgatccggggcgatgaagtgagacagatcgcaccaggacagaccggaaagatcgcagactacaactataagctgcctgacgatttcacaggctgcgtgatcgcctggaatagcgacaatctggattccaaagtgggcggcaactacaattatctgtacaggctgttccgcaagtccaacctgaagccatttgagcgggacatctccaccgagatctaccaggccggctctacaccctgcaacggcgtggagggcttcaattgttattttcccctgcagtcttacggcttccagcctacaaatggcgtgggctatcagccataccgggtggtggtgctgtcttttgagctgctgcacgcaccagcaaccgtgtgcggccccaagaagagcacacatcatcaccaccaccaccaccactga

SEQ ID NO: 5729 - DNA, 735 bp, Artificial Sequence
  Description of Artificial Sequence: Synthetic polynucleotide
atgggcatcctgccaagcccaggaatgcccgccctgctgtctctggtgagcctgctgtccgtgctgctgatgggatgcgtggcagagacaggcacaaggttccctaacatcaccaatctgtgcccattcggcgaggtgtttaacgccacacgctttgcctccgtgtatgcctggaaccggaagagaatctctaattgcgtggccgactatagcgtgctgtacaatagcgcctccttctctacctttaagtgctatggcgtgagccccaccaagctgaacgatctgtgcttcacaaacgtgtacgccgactcctttgtgatccggggcgatgaagtgagacagatcgcaccaggacagaccggaaagatcgcagactacaactataagctgcctgacgatttcacaggctgcgtgatcgcctggaatagcaaccaactggattccaaagtgggcggcaactacaattatctgtacaggctgttccgcaagtccaacctgaagccatttgagcgggacatctccaccgagatctaccaggccggctctacaccctgcaacggcgtggagggcttcaattgttattttcccctgcagtcttacggcttccagcctacaaatggcgtgggctatcagccataccgggtggtggtgctgtcttttgagctgctgcacgcaccagcaaccgtgtgcggccccaagaagagcacacatcatcaccaccaccaccaccactga

SEQ ID NO: 5730 - DNA, 735 bp, Artificial Sequence
  Description of Artificial Sequence: Synthetic polynucleotide
atgggcatcctgccaagcccaggaatgcccgccctgctgtctctggtgagcctgctgtccgtgctgctgatgggatgcgtggcagagacaggcacaaggttccctaacatcaccaatctgtgcccattcggcgaggtgtttaacgccacacgcttttcctccgtgtatgcctggaaccggaagagaatctctaattgcgtggccgactatagcgtgctgtacaatagcgcctccttctctacctttaagtgctatggcgtgagccccaccaagctgaacgatctgtgcttcacaaacgtgtacgccgactcctttgtgatccggggcgatgaagtgagacagatcgcaccaggacagaccggaaagatcgcagactacaactataagctgcctgacgatttcacaggctgcgtgatcgcctggaatagcaacaatctggattccaaagtgggcggcaactacaattatctgtacaggctgttccgcaagtccaacctgaagccatttgagcgggacatctccaccgagatctaccaggccggctctacaccctgcaacggcgtggagggcttcaattgttattttcccctgcagtcttacggcttccagcctacaaatggcgtgggctatcagccataccgggtggtggtgctgtcttttgagctgctgcacgcaccagcaaccgtgtgcggccccaagaagagcacacatcatcaccaccaccaccaccactga

SEQ ID NO: 5731 - DNA, 735 bp, Artificial Sequence
  Description of Artificial Sequence: Synthetic polynucleotide
atgggcatcctgccaagcccaggaatgcccgccctgctgtctctggtgagcctgctgtccgtgctgctgatgggatgcgtggcagagacaggcacaaggttccctaacatcaccaatctgtgcccattcggcgaggtgtttaacgccacacgctttgcctccgtgtatgcctggaaccggaagagaatctctaattgcgtggccgactatagcgtgctgtacaatagcgcctccttctctacctttaagtgctatggcgtgagccccaccaagctgaacgatctgtgcttcacaaacgtgtacgccgactcctttgtgatccggggcgatgaagtgagacagatcgcaccaggacagaccggaaagatcgcagactacaactataatctgcctgacgatttcacaggctgcgtgatcgcctggaatagcaacaatctggattccaaagtgggcggcaactacaattatctgtacaggctgttccgcaagtccaacctgaagccatttgagcgggacatctccaccgagatctaccaggccggctctacaccctgcaacggcgtggagggcttcaattgttattttcccctgcagtcttacggcttccagcctacaaatggcgtgggctatcagccataccgggtggtggtgctgtcttttgagctgctgcacgcaccagcaaccgtgtgcggccccaagaagagcacacatcatcaccaccaccaccaccactga

SEQ ID NO: 5732 - DNA, 735 bp, Artificial Sequence
  Description of Artificial Sequence: Synthetic polynucleotide
atgggcatcctgccaagcccaggaatgcccgccctgctgtctctggtgagcctgctgtccgtgctgctgatgggatgcgtggcagagacaggcacaaggttccctaacatcaccaatctgtgcccattcggcgaggtgtttaacgccacacgctttgcctccgtgtatgcctggaaccggaagagaatctctaattgcaaagccgactatagcgtgctgtacaatagcgcctccttctctacctttaagtgctatggcgtgagccccaccaagctgaacgatctgtgcttcacaaacgtgtacgccgactcctttgtgatccggggcgatgaagtgagacagatcgcaccaggacagaccggaaagatcgcagactacaactataagctgcctgacgatttcacaggctgcgtgatcgcctggaatagcaacaatctggattccaaagtgggcggcaactacaattatctgtacaggctgttccgcaagtccaacctgaagccatttgagcgggacatctccaccgagatctaccaggccggctctacaccctgcaacggcgtggagggcttcaattgttattttcccctgcagtcttacggcttccagcctacaaatggcgtgggctatcagccataccgggtggtggtgctgtcttttgagctgctgcacgcaccagcaaccgtgtgcggccccaagaagagcacacatcatcaccaccaccaccaccactga

SEQ ID NO: 5733 - DNA, 735 bp, Artificial Sequence
  Description of Artificial Sequence: Synthetic polynucleotide
atgggcatcctgccaagcccaggaatgcccgccctgctgtctctggtgagcctgctgtccgtgctgctgatgggatgcgtggcagagacaggcacaaggttccctaacatcaccaatctgtgcccattcggcgaggtgtttaacgccacacgctttgcctccgtgtatgcctggaaccggaagagaatctctaattgcgtggccgactatagcgtgctgtacaatagcgcctccttctctacctttaagtgctatggcgtgagccccaccaagctgaacgatctgtgcttcacaaacgtgtacgccgactcctttgtgatccggggcgatgaagtgagacagatcgcaccaggacagaccggaaagatcgcagactacaactataagctgcctgacgatttcacaggctgcgtgatcgcctggaatagcaacaatctggattccaaagtgggcggcaactacaattatctgtacaggctgttccgcaagtccaacctgaagccatttgagcgggacatcaaaaccgagatctaccaggccggctctacaccctgcaacggcgtggagggcttcaattgttattttcccctgcagtcttacggcttccagcctacaaatggcgtgggctatcagccataccgggtggtggtgctgtcttttgagctgctgcacgcaccagcaaccgtgtgcggccccaagaagagcacacatcatcaccaccaccaccaccactga

SEQ ID NO: 5734 - DNA, 735 bp, Artificial Sequence
  Description of Artificial Sequence: Synthetic polynucleotide
atgggcatcctgccaagcccaggaatgcccgccctgctgtctctggtgagcctgctgtccgtgctgctgatgggatgcgtggcagagacaggcacaaggttccctaacatcaccaatctgtgcccattcggcgaggtgtttaacgccacacgctttgcctccgtgtatgcctggaaccggaagagaatctctaattgcgtggccgactatagcgtgctgtacaatagcgcctccttctctacctttaagtgctatggcgtgagccccaccaagctgaacgatctgtgcttcacaaacgtgtacgccgacctttttgtgatccggggcgatgaagtgagacagatcgcaccaggacagaccggaaagatcgcagactacaactataagctgcctgacgatttcacaggctgcgtgatcgcctggaatagcaacaatctggattccaaagtgggcggcaactacaattatctgtacaggctgttccgcaagtccaacctgaagccatttgagcgggacatctccaccgagatctaccaggccggctctacaccctgcaacggcgtggagggcttcaattgttattttcccctgcagtcttacggcttccagcctacaaatggcgtgggctatcagccataccgggtggtggtgctgtcttttgagctgctgcacgcaccagcaaccgtgtgcggccccaagaagagcacacatcatcaccaccaccaccaccactga

SEQ ID NO: 5735 - DNA, 735 bp, Artificial Sequence
  Description of Artificial Sequence: Synthetic polynucleotide
atgggcatcctgccaagcccaggaatgcccgccctgctgtctctggtgagcctgctgtccgtgctgctgatgggatgcgtggcagagacaggcacaaggttccctaacatcaccaatctgtgcccattcggcgaggtgtttaacgccacacgctttgcctccgtgtatgcctggaaccggaagagaatctctaattgcgtggccgactatagcgtgctgtacaatagcgcctccttctctacctttaagtgctatggcgtgagccccaccaagctgaacgatctgtgcttcacaaacgtgtacgccgactcctttgtgatccggggcgatgaagtgagacagatcgcaccaggacagaccggaaagatcgcagactacaactataagctgcctgacgatttcacaggctgcgtgatcgcctggaatagcaacaatctggattccaaagtgggcggcaactacaattatctgtacaggctgttccgcaagtccaacctgtcaccatttgagcgggacatctccaccgagatctaccaggccggctctacaccctgcaacggcgtggagggcttcaattgttattttcccctgcagtcttacggcttccagcctacaaatggcgtgggctatcagccataccgggtggtggtgctgtcttttgagctgctgcacgcaccagcaaccgtgtgcggccccaagaagagcacacatcatcaccaccaccaccaccactga

SEQ ID NO: 5736 - DNA, 735 bp, Artificial Sequence
  Description of Artificial Sequence: Synthetic polynucleotide
atgggcatcctgccaagcccaggaatgcccgccctgctgtctctggtgagcctgctgtccgtgctgctgatgggatgcgtggcagagacaggcacaaggttccctaacatcaccaatctgtgcccattcggcgaggtgtttaacgccacacgctttgcctccgtgtatgcctggaaccggaagagaatctctaattgcgtggccgactatagcgtgctgtacaatagcgcctccttctctacctttaagtgctatggcgtgagccccaccaagctgaacgatctgaatttcacaaacgtgtacgccgactcctttgtgatccggggcgatgaagtgagacagatcgcaccaggacagaccggaaagatcgcagactacaactataagctgcctgacgatttcacaggctgcgtgatcgcctggaatagcaacaatctggattccaaagtgggcggcaactacaattatctgtacaggctgttccgcaagtccaacctgaagccatttgagcgggacatctccaccgagatctaccaggccggctctacaccctgcaacggcgtggagggcttcaattgttattttcccctgcagtcttacggcttccagcctacaaatggcgtgggctatcagccataccgggtggtggtgctgtcttttgagctgctgcacgcaccagcaaccgtgtgcggccccaagaagagcacacatcatcaccaccaccaccaccactga

SEQ ID NO: 5737 - DNA, 735 bp, Artificial Sequence
  Description of Artificial Sequence: Synthetic polynucleotide
atgggcatcctgccaagcccaggaatgcccgccctgctgtctctggtgagcctgctgtccgtgctgctgatgggatgcgtggcagagacaggcacaaggttccctaacatcaccaatctgtgcccattcggcgaggtgtttaacgccacacgctttgcctccgtgtatgccttcaaccggaagagaatctctaattgcgtggccgactatagcgtgctgtacaatagcgcctccttctctacctttaagtgctatggcgtgagccccaccaagctgaacgatctgtgcttcacaaacgtgtacgccgactcctttgtgatccggggcgatgaagtgagacagatcgcaccaggacagaccggaaagatcgcagactacaactataagctgcctgacgatttcacaggctgcgtgatcgcctggaatagcaacaatctggattccaaagtgggcggcaactacaattatctgtacaggctgttccgcaagtccaacctgaagccatttgagcgggacatctccaccgagatctaccaggccggctctacaccctgcaacggcgtggagggcttcaattgttattttcccctgcagtcttacggcttccagcctacaaatggcgtgggctatcagccataccgggtggtggtgctgtcttttgagctgctgcacgcaccagcaaccgtgtgcggccccaagaagagcacacatcatcaccaccaccaccaccactga

SEQ ID NO: 5738 - DNA, 735 bp, Artificial Sequence
  Description of Artificial Sequence: Synthetic polynucleotide
atgggcatcctgccaagcccaggaatgcccgccctgctgtctctggtgagcctgctgtccgtgctgctgatgggatgcgtggcagagacaggcacaaggttccctaacatcaccaatctgtgcccattcggcgaggtgtttaacgccacacgctttgcctccgtgtatgcctggaaccggaagagaatctctaattgcgtggccgactatagcgtgctgtacaatagcgcctccttctctacctttaagtgctatggcgtgagccccaccaagctgaacgatctgtgcttcacaaacgtgtacgccgactcctttgtgatccggggcgatgaagtgagacagatcgcaccaggacagaccggaaagatcgcagactacaactataagctgcctgacgatttcacaggctgcgtgatcgcctggaatagcaacaatctggattccaaagtgggcggcaactacaattatctgtacaggctgttccgcaagtccaacctgaagccatttgagcgggacatctccacctgtatctaccaggccggctctacaccctgcaacggcgtggagggcttcaattgttattttcccctgcagtcttacggcttccagcctacaaatggcgtgggctatcagccataccgggtggtggtgctgtcttttgagctgctgcacgcaccagcaaccgtgtgcggccccaagaagagcacacatcatcaccaccaccaccaccactga

SEQ ID NO: 5739 - DNA, 735 bp, Artificial Sequence
  Description of Artificial Sequence: Synthetic polynucleotide
atgggcatcctgccaagcccaggaatgcccgccctgctgtctctggtgagcctgctgtccgtgctgctgatgggatgcgtggcagagacaggcacaaggttccctaacatcaccaatctgtgcccattcggcgaggtgtttaacgccacacgctttgcctccgtgtatgcctggaaccggaagagaatctctaattgcgtggccgactatagcgtgctgtacaatagcgcctccttctctacctttaagtgctatggcgtgagccccaccaagctgaacgatctgtgcttcacaaacgtgtacgccgactcctttgtgatccggggcgatgaagtgagacagatcgcaccaggacagaccggaaagatcgcagactacaactataagctgcctgacgatttcacaggctgcgtgatcgcctggaatagcaacaatctggattccaaagtgggcggcaactacaattatctgtacaggctgttccgcaagtccaacctgaagccatttgagcgggacatctccaccgagatctaccaggccggctctacacccgctaacggcgtggagggcttcaattgttattttcccctgcagtcttacggcttccagcctacaaatggcgtgggctatcagccataccgggtggtggtgctgtcttttgagctgctgcacgcaccagcaaccgtgtgcggccccaagaagagcacacatcatcaccaccaccaccaccactga

SEQ ID NO: 5740 - DNA, 735 bp, Artificial Sequence
  Description of Artificial Sequence: Synthetic polynucleotide
atgggcatcctgccaagcccaggaatgcccgccctgctgtctctggtgagcctgctgtccgtgctgctgatgggatgcgtggcagagacaggcacaaggttccctaacatcaccaatctgtgcccattcggcgaggtgtttaacgccacacgctttgcctccgtgtatgcctggaaccggaagagaatctctaattgcgtggccgactatagcgtgctgtacgatagcgcctccttctctacctttaagtgctatggcgtgagccccaccaagctgaacgatctgtgcttcacaaacgtgtacgccgactcctttgtgatccggggcgatgaagtgagacagatcgcaccaggacagaccggaaagatcgcagactacaactataagctgcctgacgatttcacaggctgcgtgatcgcctggaatagcaacaatctggattccaaagtgggcggcaactacaattatctgtacaggctgttccgcaagtccaacctgaagccatttgagcgggacatctccaccgagatctaccaggccggctctacaccctgcaacggcgtggagggcttcaattgttattttcccctgcagtcttacggcttccagcctacaaatggcgtgggctatcagccataccgggtggtggtgctgtcttttgagctgctgcacgcaccagcaaccgtgtgcggccccaagaagagcacacatcatcaccaccaccaccaccactga

SEQ ID NO: 5741 - DNA, 735 bp, Artificial Sequence
  Description of Artificial Sequence: Synthetic polynucleotide
atgggcatcctgccaagcccaggaatgcccgccctgctgtctctggtgagcctgctgtccgtgctgctgatgggatgcgtggcagagacaggcacaaggttccctaacatcaccaatctgtgcccattcggcgaggtgtttaacgccacacgctttgcctccgtgtatgcctggaaccggaagagaatctctaattgcgtggccgactatagcgtgctgtacaatagcgcctccttctctacctttaagtgctatggcgtgagccccaccaagctgaacgatctgtgcttcacaaacgtgtacgccgactcctttgtgatccggggcgatgaagtgagacagatcgcaccaggacagaccggaaagatcgcagactacaactataagctgcctgacgatttcacaggctgcgtgatcgcctggaatagcaacaatctggattccaaagcgggcggcaactacaattatctgtacaggctgttccgcaagtccaacctgaagccatttgagcgggacatctccaccgagatctaccaggccggctctacaccctgcaacggcgtggagggcttcaattgttattttcccctgcagtcttacggcttccagcctacaaatggcgtgggctatcagccataccgggtggtggtgctgtcttttgagctgctgcacgcaccagcaaccgtgtgcggccccaagaagagcacacatcatcaccaccaccaccaccactga

SEQ ID NO: 5742 - DNA, 735 bp, Artificial Sequence
  Description of Artificial Sequence: Synthetic polynucleotide
atgggcatcctgccaagcccaggaatgcccgccctgctgtctctggtgagcctgctgtccgtgctgctgatgggatgcgtggcagagacaggcacaaggttccctaacatcaccaatctgtgcccattcggcgaggtgtttaacgccacacgctttgcctccgtgtatgcctggaaccggaagagaatctctaattgcgtggccgactatagcgtgctgtacaaaagcgcctccttctctacctttaagtgctatggcgtgagccccaccaagctgaacgatctgtgcttcacaaacgtgtacgccgactcctttgtgatccggggcgatgaagtgagacagatcgcaccaggacagaccggaaagatcgcagactacaactataagctgcctgacgatttcacaggctgcgtgatcgcctggaatagcaacaatctggattccaaagtgggcggcaactacaattatctgtacaggctgttccgcaagtccaacctgaagccatttgagcgggacatctccaccgagatctaccaggccggctctacaccctgcaacggcgtggagggcttcaattgttattttcccctgcagtcttacggcttccagcctacaaatggcgtgggctatcagccataccgggtggtggtgctgtcttttgagctgctgcacgcaccagcaaccgtgtgcggccccaagaagagcacacatcatcaccaccaccaccaccactga

SEQ ID NO: 5743 - DNA, 735 bp, Artificial Sequence
  Description of Artificial Sequence: Synthetic polynucleotide
atgggcatcctgccaagcccaggaatgcccgccctgctgtctctggtgagcctgctgtccgtgctgctgatgggatgcgtggcagagacaggcacaaggttccctaacatcaccaatctgtgcccattcggcgaggtgtttaacgccacacgctttgcctccgtgtatgcctggaaccggaagagaatctctaattgcgtggccgactatagcaaactgtacaatagcgcctccttctctacctttaagtgctatggcgtgagccccaccaagctgaacgatctgtgcttcacaaacgtgtacgccgactcctttgtgatccggggcgatgaagtgagacagatcgcaccaggacagaccggaaagatcgcagactacaactataagctgcctgacgatttcacaggctgcgtgatcgcctggaatagcaacaatctggattccaaagtgggcggcaactacaattatctgtacaggctgttccgcaagtccaacctgaagccatttgagcgggacatctccaccgagatctaccaggccggctctacaccctgcaacggcgtggagggcttcaattgttattttcccctgcagtcttacggcttccagcctacaaatggcgtgggctatcagccataccgggtggtggtgctgtcttttgagctgctgcacgcaccagcaaccgtgtgcggccccaagaagagcacacatcatcaccaccaccaccaccactga

SEQ ID NO: 5744 - DNA, 735 bp, Artificial Sequence
  Description of Artificial Sequence: Synthetic polynucleotide
atgggcatcctgccaagcccaggaatgcccgccctgctgtctctggtgagcctgctgtccgtgctgctgatgggatgcgtggcagagacaggcacaaggttccctaacatcaccaatctgtgcccattcggcgaggtgtttaacgccacacgctttgcctccgtgtatgcctggaaccggaagagaatctctaattgctcagccgactatagcgtgctgtacaatagcgcctccttctctacctttaagtgctatggcgtgagccccaccaagctgaacgatctgtgcttcacaaacgtgtacgccgactcctttgtgatccggggcgatgaagtgagacagatcgcaccaggacagaccggaaagatcgcagactacaactataagctgcctgacgatttcacaggctgcgtgatcgcctggaatagcaacaatctggattccaaagtgggcggcaactacaattatctgtacaggctgttccgcaagtccaacctgaagccatttgagcgggacatctccaccgagatctaccaggccggctctacaccctgcaacggcgtggagggcttcaattgttattttcccctgcagtcttacggcttccagcctacaaatggcgtgggctatcagccataccgggtggtggtgctgtcttttgagctgctgcacgcaccagcaaccgtgtgcggccccaagaagagcacacatcatcaccaccaccaccaccactga

SEQ ID NO: 5745 - DNA, 735 bp, Artificial Sequence
  Description of Artificial Sequence: Synthetic polynucleotide
atgggcatcctgccaagcccaggaatgcccgccctgctgtctctggtgagcctgctgtccgtgctgctgatgggatgcgtggcagagacaggcacaaggttccctaacatcaccaatctgtgcccattcggcgaggtgtttaacgccacacgctttccctccgtgtatgcctggaaccggaagagaatctctaattgcgtggccgactatagcgtgctgtacaatagcgcctccttctctacctttaagtgctatggcgtgagccccaccaagctgaacgatctgtgcttcacaaacgtgtacgccgactcctttgtgatccggggcgatgaagtgagacagatcgcaccaggacagaccggaaagatcgcagactacaactataagctgcctgacgatttcacaggctgcgtgatcgcctggaatagcaacaatctggattccaaagtgggcggcaactacaattatctgtacaggctgttccgcaagtccaacctgaagccatttgagcgggacatctccaccgagatctaccaggccggctctacaccctgcaacggcgtggagggcttcaattgttattttcccctgcagtcttacggcttccagcctacaaatggcgtgggctatcagccataccgggtggtggtgctgtcttttgagctgctgcacgcaccagcaaccgtgtgcggccccaagaagagcacacatcatcaccaccaccaccaccactga

SEQ ID NO: 5746 - DNA, 735 bp, Artificial Sequence
  Description of Artificial Sequence: Synthetic polynucleotide
atgggcatcctgccaagcccaggaatgcccgccctgctgtctctggtgagcctgctgtccgtgctgctgatgggatgcgtggcagagacaggcacaaggttccctaacatcaccaatctgtgcccattcggcgaggtgtttaacgccacacgctttgcctccgtgtatgcctggaaccggaagagaatctctaattgcgtggccgactatagcgtgctgtacaatagcgcctccttctctacctttaagtgctatggcgtgagccccaccaagctgaacgatctgtgcttcacaaacgtgtacgccgactcctttgtgatccggggcgatgaagtgagacagatcgcaccaggacagaccggaaagatcgcagactacaactataagctgcctgacgatttcacaggctgcgtgatcgcctggaatagcaacaatctggattccaaagtgggcggcaactacaattatctgtacaggctgttccgcaagtccaacctgaagccatttgagagtgacatctccaccgagatctaccaggccggctctacaccctgcaacggcgtggagggcttcaattgttattttcccctgcagtcttacggcttccagcctacaaatggcgtgggctatcagccataccgggtggtggtgctgtcttttgagctgctgcacgcaccagcaaccgtgtgcggccccaagaagagcacacatcatcaccaccaccaccaccactga

SEQ ID NO: 5747 - DNA, 735 bp, Artificial Sequence
  Description of Artificial Sequence: Synthetic polynucleotide
atgggcatcctgccaagcccaggaatgcccgccctgctgtctctggtgagcctgctgtccgtgctgctgatgggatgcgtggcagagacaggcacaaggttccctaacatcaccaatctgtgcccattcggcgaggtgtttaacgccacacgctttgcctccgtgtatgcctggaaccggaagagaatctctaattgcgtggccgactatagcgtgctgtacaatagcgcctccttctctacctttaagtgctatggcgtgagccccaccaagctgaacgatctgtgcttcacaaacgtgtacgccgactcctttgtgatccggggcgatgaagtgagacagatcgcaccaggacagaccggaaagatcgcagactacaactataagctgcctgacgatttcacaggctgcgtgatcgcctggaatagcaacaatctggattccaaagtgggcggcaactacaattatctgtacaggctgttccgcaagtccaacctgaagccatttgagcgggacatctccttcgagatctaccaggccggctctacaccctgcaacggcgtggagggcttcaattgttattttcccctgcagtcttacggcttccagcctacaaatggcgtgggctatcagccataccgggtggtggtgctgtcttttgagctgctgcacgcaccagcaaccgtgtgcggccccaagaagagcacacatcatcaccaccaccaccaccactga

SEQ ID NO: 5748 - DNA, 735 bp, Artificial Sequence
  Description of Artificial Sequence: Synthetic polynucleotide
atgggcatcctgccaagcccaggaatgcccgccctgctgtctctggtgagcctgctgtccgtgctgctgatgggatgcgtggcagagacaggcacaaggttccctaacatcaccaatctgtgcccattcggcgaggtgtttaacgccacacgctttgcctccgtgtatgcctggaaccggaagagaatctctaattgcgtggccaattatagcgtgctgtacaatagcgcctccttctctacctttaagtgctatggcgtgagccccaccaagctgaacgatctgtgcttcacaaacgtgtacgccgactcctttgtgatccggggcgatgaagtgagacagatcgcaccaggacagaccggaaagatcgcagactacaactataagctgcctgacgatttcacaggctgcgtgatcgcctggaatagcaacaatctggattccaaagtgggcggcaactacaattatctgtacaggctgttccgcaagtccaacctgaagccatttgagcgggacatctccaccgagatctaccaggccggctctacaccctgcaacggcgtggagggcttcaattgttattttcccctgcagtcttacggcttccagcctacaaatggcgtgggctatcagccataccgggtggtggtgctgtcttttgagctgctgcacgcaccagcaaccgtgtgcggccccaagaagagcacacatcatcaccaccaccaccaccactga

SEQ ID NO: 5749 - DNA, 735 bp, Artificial Sequence
  Description of Artificial Sequence: Synthetic polynucleotide
atgggcatcctgccaagcccaggaatgcccgccctgctgtctctggtgagcctgctgtccgtgctgctgatgggatgcgtggcagagacaggcacaaggttccctaacatcaccaatctgtgcccattcggcgaggtgtttaacgccacacgctttgcctccgtgtatgcctggaaccggaagagaatctctaattgcgtggccgactatagcgtgctgtacaatagcgcctccttctctacctttaagtgctatggcgtgagccccaccaagctgaacgatctgtgcttcacaaacgtgtacgccgactcctttgtgatccggggcgatgaagtgagacagatcgcaccaggacagaccggaaagatcgcagactacaactataagctgcctgacgatttcacaggctgcgtgatcgcctggaatagcaacaatctggattccaaagtgggcggcaactacaattatctgtacaggctgttccgcaagtccaacctgaagccatttgagcgggacatctccaccgagttttaccaggccggctctacaccctgcaacggcgtggagggcttcaattgttattttcccctgcagtcttacggcttccagcctacaaatggcgtgggctatcagccataccgggtggtggtgctgtcttttgagctgctgcacgcaccagcaaccgtgtgcggccccaagaagagcacacatcatcaccaccaccaccaccactga

SEQ ID NO: 5750 - DNA, 735 bp, Artificial Sequence
  Description of Artificial Sequence: Synthetic polynucleotide
atgggcatcctgccaagcccaggaatgcccgccctgctgtctctggtgagcctgctgtccgtgctgctgatgggatgcgtggcagagacaggcacaaggttccctaacatcaccaatctgtgcccattcggcgaggtgtttaacgccacacgctttgcctccgtgtatgcctggaaccggaagagaatctctaattgcgtggccgactatagcgtgctgtacaatagcgcctccttctctacctttaagtgctatggcgtgagccccaccaagctgaacgatctgtgcttcacaaacgtgtacgccgactcctttgtgatccggggcgatgaagtgagacagatcgcaccaggacagaccggaaagatcgcagactacaactataagctgcctgacgatttcacaggctgcgtgatcgcctggaatagcaacaatctggattccaaaaatggcggcaactacaattatctgtacaggctgttccgcaagtccaacctgaagccatttgagcgggacatctccaccgagatctaccaggccggctctacaccctgcaacggcgtggagggcttcaattgttattttcccctgcagtcttacggcttccagcctacaaatggcgtgggctatcagccataccgggtggtggtgctgtcttttgagctgctgcacgcaccagcaaccgtgtgcggccccaagaagagcacacatcatcaccaccaccaccaccactga

SEQ ID NO: 5751 - DNA, 735 bp, Artificial Sequence
  Description of Artificial Sequence: Synthetic polynucleotide
atgggcatcctgccaagcccaggaatgcccgccctgctgtctctggtgagcctgctgtccgtgctgctgatgggatgcgtggcagagacaggcacaaggttccctaacatcaccaatctgtgcccattcggcgaggtgtttaacgccacacgctttgcctccgtgtatgcctggaaccggaagagaatctctaattgcgtggccgactatagcgtgctgtacaatagcgcctccttctctacctttaagtgctatggcgtgagccccaccaagctgaacgatctgtgcttcacaaacgtgtacgccgactcctttgtgatccggggcgatgaagtgagacagatcgcaccaggacagaccggaaagatcgcagactacaactataagctgcctgacgatttcacaggctgcgtgatcgcctggaatagcaacaatctggattccaaagtgggcggcaactacaattatctgtacaggctgttccgcaagtccaacctgaagccatttgagcgggacatctccaccatgatctaccaggccggctctacaccctgcaacggcgtggagggcttcaattgttattttcccctgcagtcttacggcttccagcctacaaatggcgtgggctatcagccataccgggtggtggtgctgtcttttgagctgctgcacgcaccagcaaccgtgtgcggccccaagaagagcacacatcatcaccaccaccaccaccactga

SEQ ID NO: 5752 - DNA, 735 bp, Artificial Sequence
  Description of Artificial Sequence: Synthetic polynucleotide
atgggcatcctgccaagcccaggaatgcccgccctgctgtctctggtgagcctgctgtccgtgctgctgatgggatgcgtggcagagacaggcacaaggttccctaacgttaccaatctgtgcccattcggcgaggtgtttaacgccacacgctttgcctccgtgtatgcctggaaccggaagagaatctctaattgcgtggccgactatagcgtgctgtacaatagcgcctccttctctacctttaagtgctatggcgtgagccccaccaagctgaacgatctgtgcttcacaaacgtgtacgccgactcctttgtgatccggggcgatgaagtgagacagatcgcaccaggacagaccggaaagatcgcagactacaactataagctgcctgacgatttcacaggctgcgtgatcgcctggaatagcaacaatctggattccaaagtgggcggcaactacaattatctgtacaggctgttccgcaagtccaacctgaagccatttgagcgggacatctccaccgagatctaccaggccggctctacaccctgcaacggcgtggagggcttcaattgttattttcccctgcagtcttacggcttccagcctacaaatggcgtgggctatcagccataccgggtggtggtgctgtcttttgagctgctgcacgcaccagcaaccgtgtgcggccccaagaagagcacacatcatcaccaccaccaccaccactga

SEQ ID NO: 5753 - DNA, 735 bp, Artificial Sequence
  Description of Artificial Sequence: Synthetic polynucleotide
atgggcatcctgccaagcccaggaatgcccgccctgctgtctctggtgagcctgctgtccgtgctgctgatgggatgcgtggcagagacaggcacaaggttccctaacatcaccaatctgtgcccattcggcgaggtgtttaacgccacacgctttgcctccgtgtatgcctggaaccggaagagaatctctaattgcgtggccgactatagcgtgctgtacaatagcgcctccttctctacctttaagtgctatggcgtgagccccaccaagctgaacgatctgtgctggacaaacgtgtacgccgactcctttgtgatccggggcgatgaagtgagacagatcgcaccaggacagaccggaaagatcgcagactacaactataagctgcctgacgatttcacaggctgcgtgatcgcctggaatagcaacaatctggattccaaagtgggcggcaactacaattatctgtacaggctgttccgcaagtccaacctgaagccatttgagcgggacatctccaccgagatctaccaggccggctctacaccctgcaacggcgtggagggcttcaattgttattttcccctgcagtcttacggcttccagcctacaaatggcgtgggctatcagccataccgggtggtggtgctgtcttttgagctgctgcacgcaccagcaaccgtgtgcggccccaagaagagcacacatcatcaccaccaccaccaccactga

SEQ ID NO: 5754 - DNA, 735 bp, Artificial Sequence
  Description of Artificial Sequence: Synthetic polynucleotide
atgggcatcctgccaagcccaggaatgcccgccctgctgtctctggtgagcctgctgtccgtgctgctgatgggatgcgtggcagagacaggcacaaggttccctaacatcaccaatctgtgcccattcggcgaggtgtttaacgccacacgctttgcctccgtgtatgcctggaaccggaagagaatctctaattgcgtggccgactatagcgtgctgtacaatagcgcctccttctctacctttaagtgctatggcgtgagccccaccaagctgaacgatctgtgcttcacaaacgtgtacgccgactcctttgtgatccggggcgatgaagtgagacagatcgcaccaggacagaccggaaagatcgcagactacaactatacgctgcctgacgatttcacaggctgcgtgatcgcctggaatagcaacaatctggattccaaagtgggcggcaactacaattatctgtacaggctgttccgcaagtccaacctgaagccatttgagcgggacatctccaccgagatctaccaggccggctctacaccctgcaacggcgtggagggcttcaattgttattttcccctgcagtcttacggcttccagcctacaaatggcgtgggctatcagccataccgggtggtggtgctgtcttttgagctgctgcacgcaccagcaaccgtgtgcggccccaagaagagcacacatcatcaccaccaccaccaccactga

SEQ ID NO: 5755 - DNA, 735 bp, Artificial Sequence
  Description of Artificial Sequence: Synthetic polynucleotide
atgggcatcctgccaagcccaggaatgcccgccctgctgtctctggtgagcctgctgtccgtgctgctgatgggatgcgtggcagagacaggcacaaggttccctaacatcaccaatctgtgcccattcggcgaggtgtttaacgccacacgctttgcctccgtgtatgcctggaaccggaagagaatctctaattgctacgccgactatagcgtgctgtacaatagcgcctccttctctacctttaagtgctatggcgtgagccccaccaagctgaacgatctgtgcttcacaaacgtgtacgccgactcctttgtgatccggggcgatgaagtgagacagatcgcaccaggacagaccggaaagatcgcagactacaactataagctgcctgacgatttcacaggctgcgtgatcgcctggaatagcaacaatctggattccaaagtgggcggcaactacaattatctgtacaggctgttccgcaagtccaacctgaagccatttgagcgggacatctccaccgagatctaccaggccggctctacaccctgcaacggcgtggagggcttcaattgttattttcccctgcagtcttacggcttccagcctacaaatggcgtgggctatcagccataccgggtggtggtgctgtcttttgagctgctgcacgcaccagcaaccgtgtgcggccccaagaagagcacacatcatcaccaccaccaccaccactga

SEQ ID NO: 5756 - DNA, 735 bp, Artificial Sequence
  Description of Artificial Sequence: Synthetic polynucleotide
atgggcatcctgccaagcccaggaatgcccgccctgctgtctctggtgagcctgctgtccgtgctgctgatgggatgcgtggcagagacaggcacaaggttccctaacatcaccaatctgtgcccattcggcgaggtgtttaacgccacacgctttgcctccgtgtatgcctggaaccggaagagaatctctaattgcgtggccgactatagcgtgctgtacaatagcgcctccttctctacctttaagtgctatggcgtgagccccaccaagctgaacgatctgtgcttcacaaacgtgtacgccgactcctttgtgatccggggcgatgaagtgagacagatcgcaccaggacagaccggaaagatcgcagactacaactataagctgcctgacgatttcacaggctgcgtgatcgcctggaatagcaacaatctggattccaaagtgggcggcaactacaattatctgtacaggctgttccgcaagtccaacctgaagccatttgagcgggacatctccaccgagatctaccaggccggctctacaccctgcaacggcgtggagggcttcaattgttattttcccctgcagtcttacggcttccagcctacaaatggcgtgggctatcagccataccgggtggtggtgctgtcttttgagctgctgcactacccagcaaccgtgtgcggccccaagaagagcacacatcatcaccaccaccaccaccactga

SEQ ID NO: 5757 - DNA, 735 bp, Artificial Sequence
  Description of Artificial Sequence: Synthetic polynucleotide
atgggcatcctgccaagcccaggaatgcccgccctgctgtctctggtgagcctgctgtccgtgctgctgatgggatgcgtggcagagacaggcacaaggttccctaacatcaccaatctgtgcccattcggcgaggtgtttaacgccacacgctttgcctccgtgtatgcctggaaccggaagagaatctctaattgcgtggccgactatagcgtgctgtacaatagcgcctccttctctacctttaagtgctatggcgtgagccccaccaagctgaacgatctgtgcttcacaaacgtgtacgccgactcctttgtgatccggggcgatgaagtgagacagatcgcaccaggacagaccggaaagatcgcagactacaactataagctgcctgacgatttcacaggctgcgtgatcgcctggaatagcaacaatctggattccaaagtgggcggcaactacaattatctgtacaggctgttccgcaagtccaacctgaagccatttgagcgggacatctccaccgagatctaccaggccggctctacaccctgcaacggcgtggagggcttcaattgttattttcccctgcagtcttacggcttccagcctacaaatggcgtgggctatcagccataccgggtggtggtgctgaaatttgagctgctgcacgcaccagcaaccgtgtgcggccccaagaagagcacacatcatcaccaccaccaccaccactga

SEQ ID NO: 5758 - DNA, 735 bp, Artificial Sequence
  Description of Artificial Sequence: Synthetic polynucleotide
atgggcatcctgccaagcccaggaatgcccgccctgctgtctctggtgagcctgctgtccgtgctgctgatgggatgcgtggcagagacaggcacaaggttccctaacatcaccaatctgtgcccattcggcgaggtgtttaacgccacacgctttgcctccgtgtatgcctggaaccggaagagaatctctaattgcgtggccgactatagcgtgctgtacaatagcgcctccttctctacctttaagtgctatggcgtgagccccaccaagctgaacgatctgtgcttcacaaacgtgtacgccgactcctttgtgatccggggcgatgaagtgagacagatcgcaccaggacagaccggaaagatcgcagactacaactataagctgcctgacgatttcacaggctgcgtgatcgcctggaatagcaacaatctggattccaaagtgggcggcaactacaattatctgtacaggctgttccgcaagtccaacctgaagccatttgagcgggacatctccaccgagatctaccaggccggctctacaccctgcaacggcgtggagggcttcaattgttattttcccctgcagtcttactcgttccagcctacaaatggcgtgggctatcagccataccgggtggtggtgctgtcttttgagctgctgcacgcaccagcaaccgtgtgcggccccaagaagagcacacatcatcaccaccaccaccaccactga

SEQ ID NO: 5759 - DNA, 735 bp, Artificial Sequence
  Description of Artificial Sequence: Synthetic polynucleotide
atgggcatcctgccaagcccaggaatgcccgccctgctgtctctggtgagcctgctgtccgtgctgctgatgggatgcgtggcagagacaggcacaaggttccctaacatcaccaatctgtgcccattcggcgaggtgtttaacgccacacgctttgcctccgtgtatgcctggaaccggaagagaatctctaattgcgtggccgactatagcgtgctgtacaatagcgcctccttctctacctttaagtgctatggcgtgagccccaccaagctgaacgatctgtgcttcacaaacgtgtacgccgactcctttgtgatccggggcgatgaaattagacagatcgcaccaggacagaccggaaagatcgcagactacaactataagctgcctgacgatttcacaggctgcgtgatcgcctggaatagcaacaatctggattccaaagtgggcggcaactacaattatctgtacaggctgttccgcaagtccaacctgaagccatttgagcgggacatctccaccgagatctaccaggccggctctacaccctgcaacggcgtggagggcttcaattgttattttcccctgcagtcttacggcttccagcctacaaatggcgtgggctatcagccataccgggtggtggtgctgtcttttgagctgctgcacgcaccagcaaccgtgtgcggccccaagaagagcacacatcatcaccaccaccaccaccactga

SEQ ID NO: 5760 - DNA, 735 bp, Artificial Sequence
  Description of Artificial Sequence: Synthetic polynucleotide
atgggcatcctgccaagcccaggaatgcccgccctgctgtctctggtgagcctgctgtccgtgctgctgatgggatgcgtggcagagacaggcacaaggttccctaacatcaccaatctgtgcccattcggcgaggtgtttaacgccacacgctttgcctccgtggctgcctggaaccggaagagaatctctaattgcgtggccgactatagcgtgctgtacaatagcgcctccttctctacctttaagtgctatggcgtgagccccaccaagctgaacgatctgtgcttcacaaacgtgtacgccgactcctttgtgatccggggcgatgaagtgagacagatcgcaccaggacagaccggaaagatcgcagactacaactataagctgcctgacgatttcacaggctgcgtgatcgcctggaatagcaacaatctggattccaaagtgggcggcaactacaattatctgtacaggctgttccgcaagtccaacctgaagccatttgagcgggacatctccaccgagatctaccaggccggctctacaccctgcaacggcgtggagggcttcaattgttattttcccctgcagtcttacggcttccagcctacaaatggcgtgggctatcagccataccgggtggtggtgctgtcttttgagctgctgcacgcaccagcaaccgtgtgcggccccaagaagagcacacatcatcaccaccaccaccaccactga

SEQ ID NO: 5761 - DNA, 735 bp, Artificial Sequence
  Description of Artificial Sequence: Synthetic polynucleotide
atgggcatcctgccaagcccaggaatgcccgccctgctgtctctggtgagcctgctgtccgtgctgctgatgggatgcgtggcagagacaggcacaaggttccctaacatcaccaatctgtgcccattcggcgaggtgtttaacgccacacgctttgcctccgtgtatgcctggaaccggaagagaatctctaattgccaagccgactatagcgtgctgtacaatagcgcctccttctctacctttaagtgctatggcgtgagccccaccaagctgaacgatctgtgcttcacaaacgtgtacgccgactcctttgtgatccggggcgatgaagtgagacagatcgcaccaggacagaccggaaagatcgcagactacaactataagctgcctgacgatttcacaggctgcgtgatcgcctggaatagcaacaatctggattccaaagtgggcggcaactacaattatctgtacaggctgttccgcaagtccaacctgaagccatttgagcgggacatctccaccgagatctaccaggccggctctacaccctgcaacggcgtggagggcttcaattgttattttcccctgcagtcttacggcttccagcctacaaatggcgtgggctatcagccataccgggtggtggtgctgtcttttgagctgctgcacgcaccagcaaccgtgtgcggccccaagaagagcacacatcatcaccaccaccaccaccactga

SEQ ID NO: 5762 - DNA, 735 bp, Artificial Sequence
  Description of Artificial Sequence: Synthetic polynucleotide
atgggcatcctgccaagcccaggaatgcccgccctgctgtctctggtgagcctgctgtccgtgctgctgatgggatgcgtggcagagacaggcacaaggttccctaacatcaccaatctgtgcccattcggcgaggtgtttaacgccacacgctttgcctccgtgtatgcctggaaccggaagagaatctctaattgcgtggccgactatagcgtgctgtacaatagcgcctccttctctacctttaagtgctatggcgtgagccccaccaagctgaacgatctgtgcttcacaaacgtgtacgccgactcctttgtgatccggggcgatgaagtgagacagatcgcaccaggacagaccggaaagatcgcagactacaactataagctgcctgacgatttcacaggctgcgtgatcgcctggaatagcaacaatctggattccaaagtgggcggcaactacaattatctgtacaggctgttccgcaagtccaacctgaagccattttcacgggacatctccaccgagatctaccaggccggctctacaccctgcaacggcgtggagggcttcaattgttattttcccctgcagtcttacggcttccagcctacaaatggcgtgggctatcagccataccgggtggtggtgctgtcttttgagctgctgcacgcaccagcaaccgtgtgcggccccaagaagagcacacatcatcaccaccaccaccaccactga

SEQ ID NO: 5763 - DNA, 735 bp, Artificial Sequence
  Description of Artificial Sequence: Synthetic polynucleotide
atgggcatcctgccaagcccaggaatgcccgccctgctgtctctggtgagcctgctgtccgtgctgctgatgggatgcgtggcagagacaggcacaaggttccctaacatcaccaatctgtgcccattcggcgaggtgtttaacgccacacgctttgcctccgtgtatgcctggaaccggaagagaatctctaattgcgtggccgactatagcgtgctgtacaatagcgcctccttctctacctttaagtgctatggcgtgagccccaccaagctgaacgatctgtgcttcacaaacgtgtacgccgactcctttgtgatccggggcgatgaagtgagacagatcgcaccaggacagaccggaaagatcgcagactacaactataagctgcctgacgatttcacaggctgcgtgatcgcctggaatagcaacaatctggattccaaagtgggcggcaactacaattatctgtacaggctgttccgcaagtccaacctgaagccatttgagcgggacatctcccgagagatctaccaggccggctctacaccctgcaacggcgtggagggcttcaattgttattttcccctgcagtcttacggcttccagcctacaaatggcgtgggctatcagccataccgggtggtggtgctgtcttttgagctgctgcacgcaccagcaaccgtgtgcggccccaagaagagcacacatcatcaccaccaccaccaccactga

SEQ ID NO: 5764 - DNA, 735 bp, Artificial Sequence
  Description of Artificial Sequence: Synthetic polynucleotide
atgggcatcctgccaagcccaggaatgcccgccctgctgtctctggtgagcctgctgtccgtgctgctgatgggatgcgtggcagagacaggcacaaggttccctaacatcaccaatctgtgcccattcggcgaggtgtttaacgccacacgctttgcctccgtgtatgcctggaaccggaagagaatctctaattgcgtggccgactatagcgtgctgtacaatagcgcctccttctctacctttaagtgctatggcgtgagccccaccaagctgaacgatctgtgcttcacaaacgtgtacgccgactcctttgtgatccggggcgatgaagtgagacagatcgcaccaggacagaccggaaagatcgcagactacaactataagctgcctgacgatttcacaggctgcgtgatcgcctggaatagcaacaatctggattccaaagtgggcggcaactacaattatctgtacaggctgttccgcaagtccaacctgaagccatttgagcgggacatctccaccgagatctaccaggccggctctacaccctgcaacggcgtggagggcttcaattgttattttcccctgcagtcttacggcttccagcctacaaatggcgtgggctatcagccataccgggtggtggtgctgtcttttgagctgctgccggcaccagcaaccgtgtgcggccccaagaagagcacacatcatcaccaccaccaccaccactga

SEQ ID NO: 5765 - DNA, 735 bp, Artificial Sequence
  Description of Artificial Sequence: Synthetic polynucleotide
atgggcatcctgccaagcccaggaatgcccgccctgctgtctctggtgagcctgctgtccgtgctgctgatgggatgcgtggcagagacaggcacaaggttccctaacatcaccaatctgtgcccattcggcgaggtgtttaacgccacacgctttgcctccgtgtatgcctggaaccggaagagaatctctaattgcgtggccgactatagcagtctgtacaatagcgcctccttctctacctttaagtgctatggcgtgagccccaccaagctgaacgatctgtgcttcacaaacgtgtacgccgactcctttgtgatccggggcgatgaagtgagacagatcgcaccaggacagaccggaaagatcgcagactacaactataagctgcctgacgatttcacaggctgcgtgatcgcctggaatagcaacaatctggattccaaagtgggcggcaactacaattatctgtacaggctgttccgcaagtccaacctgaagccatttgagcgggacatctccaccgagatctaccaggccggctctacaccctgcaacggcgtggagggcttcaattgttattttcccctgcagtcttacggcttccagcctacaaatggcgtgggctatcagccataccgggtggtggtgctgtcttttgagctgctgcacgcaccagcaaccgtgtgcggccccaagaagagcacacatcatcaccaccaccaccaccactga

SEQ ID NO: 5766 - DNA, 735 bp, Artificial Sequence
  Description of Artificial Sequence: Synthetic polynucleotide
atgggcatcctgccaagcccaggaatgcccgccctgctgtctctggtgagcctgctgtccgtgctgctgatgggatgcgtggcagagacaggcacaaggttccctaacatcaccaatctgtgcccaataggcgaggtgtttaacgccacacgctttgcctccgtgtatgcctggaaccggaagagaatctctaattgcgtggccgactatagcgtgctgtacaatagcgcctccttctctacctttaagtgctatggcgtgagccccaccaagctgaacgatctgtgcttcacaaacgtgtacgccgactcctttgtgatccggggcgatgaagtgagacagatcgcaccaggacagaccggaaagatcgcagactacaactataagctgcctgacgatttcacaggctgcgtgatcgcctggaatagcaacaatctggattccaaagtgggcggcaactacaattatctgtacaggctgttccgcaagtccaacctgaagccatttgagcgggacatctccaccgagatctaccaggccggctctacaccctgcaacggcgtggagggcttcaattgttattttcccctgcagtcttacggcttccagcctacaaatggcgtgggctatcagccataccgggtggtggtgctgtcttttgagctgctgcacgcaccagcaaccgtgtgcggccccaagaagagcacacatcatcaccaccaccaccaccactga

SEQ ID NO: 5767 - DNA, 735 bp, Artificial Sequence
  Description of Artificial Sequence: Synthetic polynucleotide
atgggcatcctgccaagcccaggaatgcccgccctgctgtctctggtgagcctgctgtccgtgctgctgatgggatgcgtggcagagacaggcacaaggttccctaacatcaccaatctgtgcccattcggcgaggtgtttaacgccacacgctttgcctccgtgtatgcctggaaccggaagagaatctctaattgcgtggccgacataagcgtgctgtacaatagcgcctccttctctacctttaagtgctatggcgtgagccccaccaagctgaacgatctgtgcttcacaaacgtgtacgccgactcctttgtgatccggggcgatgaagtgagacagatcgcaccaggacagaccggaaagatcgcagactacaactataagctgcctgacgatttcacaggctgcgtgatcgcctggaatagcaacaatctggattccaaagtgggcggcaactacaattatctgtacaggctgttccgcaagtccaacctgaagccatttgagcgggacatctccaccgagatctaccaggccggctctacaccctgcaacggcgtggagggcttcaattgttattttcccctgcagtcttacggcttccagcctacaaatggcgtgggctatcagccataccgggtggtggtgctgtcttttgagctgctgcacgcaccagcaaccgtgtgcggccccaagaagagcacacatcatcaccaccaccaccaccactga

SEQ ID NO: 5768 - DNA, 735 bp, Artificial Sequence
  Description of Artificial Sequence: Synthetic polynucleotide
atgggcatcctgccaagcccaggaatgcccgccctgctgtctctggtgagcctgctgtccgtgctgctgatgggatgcgtggcagagacaggcacaaggttccctaacatcaccaatctgtgcccattcggcgaggtgtttaacgccacacgctttgcctccgtgtatgcctggaaccggaagagaatctctaattgcgtggccgactatagcgaactgtacaatagcgcctccttctctacctttaagtgctatggcgtgagccccaccaagctgaacgatctgtgcttcacaaacgtgtacgccgactcctttgtgatccggggcgatgaagtgagacagatcgcaccaggacagaccggaaagatcgcagactacaactataagctgcctgacgatttcacaggctgcgtgatcgcctggaatagcaacaatctggattccaaagtgggcggcaactacaattatctgtacaggctgttccgcaagtccaacctgaagccatttgagcgggacatctccaccgagatctaccaggccggctctacaccctgcaacggcgtggagggcttcaattgttattttcccctgcagtcttacggcttccagcctacaaatggcgtgggctatcagccataccgggtggtggtgctgtcttttgagctgctgcacgcaccagcaaccgtgtgcggccccaagaagagcacacatcatcaccaccaccaccaccactga

SEQ ID NO: 5769 - DNA, 735 bp, Artificial Sequence
  Description of Artificial Sequence: Synthetic polynucleotide
atgggcatcctgccaagcccaggaatgcccgccctgctgtctctggtgagcctgctgtccgtgctgctgatgggatgcgtggcagagacaggcacaaggttccctaacatcaccaatctgtgcccattcggcgaggtgtttaacgccacacgctttgcctccgtgtatgcctggaaccggaagagaatctctaattgcgtggccgactatagcgtgctgtacaatagcgcctccttctctacctttaagtgctatggcgtgagccccaccaagctgaacgatctgtgcttcacaaacgtgtacgccgactcctttgtgatccggggcgatgaagtgagacagatcgcaccaggacagaccggaaagatcgcagactacaactataagctgcctgacgatttcacaggctgcgtgatcgcctggaatagcaacaatctggattccaaagtgggcggcaactacaattatctgtacaggctgttccgcaagtccaacctgaagccatttgagcgggacatctccaccgagatctaccaggccggctctacaccctgcaacggcgtggagggcttcaattgttattttcccctgcagtcttacggcttccagcctacaaatggcgtgggctatcagccataccgggtggtggtgctgtcttttgagctggtccacgcaccagcaaccgtgtgcggccccaagaagagcacacatcatcaccaccaccaccaccactga

SEQ ID NO: 5770 - DNA, 735 bp, Artificial Sequence
  Description of Artificial Sequence: Synthetic polynucleotide
atgggcatcctgccaagcccaggaatgcccgccctgctgtctctggtgagcctgctgtccgtgctgctgatgggatgcgtggcagagacaggcacaaggttccctaacatcaccaatctgtgcccattcggcgaggtgtttaacgccacacgctttgcctccgtgtatgcctggaaccggaagagaatctctaattgcgtgtgggactatagcgtgctgtacaatagcgcctccttctctacctttaagtgctatggcgtgagccccaccaagctgaacgatctgtgcttcacaaacgtgtacgccgactcctttgtgatccggggcgatgaagtgagacagatcgcaccaggacagaccggaaagatcgcagactacaactataagctgcctgacgatttcacaggctgcgtgatcgcctggaatagcaacaatctggattccaaagtgggcggcaactacaattatctgtacaggctgttccgcaagtccaacctgaagccatttgagcgggacatctccaccgagatctaccaggccggctctacaccctgcaacggcgtggagggcttcaattgttattttcccctgcagtcttacggcttccagcctacaaatggcgtgggctatcagccataccgggtggtggtgctgtcttttgagctgctgcacgcaccagcaaccgtgtgcggccccaagaagagcacacatcatcaccaccaccaccaccactga

SEQ ID NO: 5771 - DNA, 735 bp, Artificial Sequence
  Description of Artificial Sequence: Synthetic polynucleotide
atgggcatcctgccaagcccaggaatgcccgccctgctgtctctggtgagcctgctgtccgtgctgctgatgggatgcgtggcagagacaggcacaaggttccctaacatcaccaatctgtgcccattcggcgaggtgtttaacgccacacgctttgcctccgtgtatcaatggaaccggaagagaatctctaattgcgtggccgactatagcgtgctgtacaatagcgcctccttctctacctttaagtgctatggcgtgagccccaccaagctgaacgatctgtgcttcacaaacgtgtacgccgactcctttgtgatccggggcgatgaagtgagacagatcgcaccaggacagaccggaaagatcgcagactacaactataagctgcctgacgatttcacaggctgcgtgatcgcctggaatagcaacaatctggattccaaagtgggcggcaactacaattatctgtacaggctgttccgcaagtccaacctgaagccatttgagcgggacatctccaccgagatctaccaggccggctctacaccctgcaacggcgtggagggcttcaattgttattttcccctgcagtcttacggcttccagcctacaaatggcgtgggctatcagccataccgggtggtggtgctgtcttttgagctgctgcacgcaccagcaaccgtgtgcggccccaagaagagcacacatcatcaccaccaccaccaccactga

SEQ ID NO: 5772 - DNA, 735 bp, Artificial Sequence
  Description of Artificial Sequence: Synthetic polynucleotide
atgggcatcctgccaagcccaggaatgcccgccctgctgtctctggtgagcctgctgtccgtgctgctgatgggatgcgtggcagagacaggcacaaggttccctaacatcaccaatctgtgcccattcggcgaggtgtttaacgccacacgctttgcctccgtgtatgcctggaaccggaagagaatctctaattgcgtggccgactatagcgtgctgtacaatagcgcctccttctctacctttaagtgctatggcgtgagccccaccaagctgaacgatctgtgcttcacaaacgtgtacgccgactcctttgtgatccggggcgatcacgtgagacagatcgcaccaggacagaccggaaagatcgcagactacaactataagctgcctgacgatttcacaggctgcgtgatcgcctggaatagcaacaatctggattccaaagtgggcggcaactacaattatctgtacaggctgttccgcaagtccaacctgaagccatttgagcgggacatctccaccgagatctaccaggccggctctacaccctgcaacggcgtggagggcttcaattgttattttcccctgcagtcttacggcttccagcctacaaatggcgtgggctatcagccataccgggtggtggtgctgtcttttgagctgctgcacgcaccagcaaccgtgtgcggccccaagaagagcacacatcatcaccaccaccaccaccactga

SEQ ID NO: 5773 - DNA, 735 bp, Artificial Sequence
  Description of Artificial Sequence: Synthetic polynucleotide
atgggcatcctgccaagcccaggaatgcccgccctgctgtctctggtgagcctgctgtccgtgctgctgatgggatgcgtggcagagacaggcacaaggttccctaacatcaccaatctgtgcccattcggcgaggtgtttaacgccacacgctttgcctccgtgtatgcctggaaccggaagagaatctctaattgcgtggccgactatagcgtgctgtacaatagcgcctccttctctacctttaagtgctatggcgtgagccccaccaagctgaacgatctgtgcttcacaaacgtgtacgccgactcctttgtgatccggggcgatgaagtgagacagatcgcaccaggacagaccggaaagatcgcagactacaactataagctgcctgacgatttcacaggctgcgtgatcgcctggaatagcaacaatctggattccaaagtgggcggcaactacaattatctgtacaggctgttccgcaagtccaacctgaagccatttgagcgggacatctccaccgagatctaccaggccggctctacaccctgcaacggcgtggagggcttcaattgttattttcccctgcagtcttacggcttccagcctacaaatggcgtgggctatcagccataccgggtggtggtgctgtcttttgagctgaaacacgcaccagcaaccgtgtgcggccccaagaagagcacacatcatcaccaccaccaccaccactga

SEQ ID NO: 5774 - DNA, 735 bp, Artificial Sequence
  Description of Artificial Sequence: Synthetic polynucleotide
atgggcatcctgccaagcccaggaatgcccgccctgctgtctctggtgagcctgctgtccgtgctgctgatgggatgcgtggcagagacaggcacaaggttccctaacatcaccaatctgtgcccattcggcgaggtgtttaacgccacacgctttgcctccgtgtatgcctggaaccggaagagaatctctaattgcgtggccgactatagcgtgctgtacaatagcgcctccttctctacctttaagtgctatggcgtgagccccaccaagctgaacgatctgtgcttcacaaacgtgtacgccgactcctttgtgatccggggcgatgaagtgagacagatcgcaccaggacagaccggaaagatcgcagactacaactataagctgcctgacgatttcacaggctgcgtgatcgcctggaatagcaacaatctggattccaaagtgggcggcaactacaattatctgtacaggctgttccgcaagtccaacctgaagccatttgagctcgacatctccaccgagatctaccaggccggctctacaccctgcaacggcgtggagggcttcaattgttattttcccctgcagtcttacggcttccagcctacaaatggcgtgggctatcagccataccgggtggtggtgctgtcttttgagctgctgcacgcaccagcaaccgtgtgcggccccaagaagagcacacatcatcaccaccaccaccaccactga

SEQ ID NO: 5775 - DNA, 735 bp, Artificial Sequence
  Description of Artificial Sequence: Synthetic polynucleotide
atgggcatcctgccaagcccaggaatgcccgccctgctgtctctggtgagcctgctgtccgtgctgctgatgggatgcgtggcagagacaggcacaaggttccctaacatcaccaatctgtgcccattcggcgaggtgtttaacgccacacgctttgcctccgtgtatgcctggaaccggaagagaatctctaattgcgtggccgactatagcgtgctgtacaatagcgcctccttctctacctttaagtgctatggcgtgagccccaccaagctgaacgatctgtgcttcacaaacgtgtacgccgactcctttgtgatccggggcgatgaagtgagacagatcgcaccaggacagaccggaaagatcgcagactacaactataagctgcctgacgatttcacaggctgcgtgatcgcctggaatagcaacaatctggattccaaagtgggcggcaactacaattatctgtacaggctgttccgcaagtccaacctgaagccatttgagcgggacatctcctgggagatctaccaggccggctctacaccctgcaacggcgtggagggcttcaattgttattttcccctgcagtcttacggcttccagcctacaaatggcgtgggctatcagccataccgggtggtggtgctgtcttttgagctgctgcacgcaccagcaaccgtgtgcggccccaagaagagcacacatcatcaccaccaccaccaccactga

SEQ ID NO: 5776 - DNA, 735 bp, Artificial Sequence
  Description of Artificial Sequence: Synthetic polynucleotide
atgggcatcctgccaagcccaggaatgcccgccctgctgtctctggtgagcctgctgtccgtgctgctgatgggatgcgtggcagagacaggcacaaggttccctaacatcaccaatctgtgcccattcggcgaggtgtttaacgccacacgctttgcctccgtgtatgcctggaaccggaagagaatctctaattgcgtggccgactatagcgtgctgtacaatagcgcctccttctctacctttaagtgctatggcgtgagccccaccaagctgaacgatctgtgcgcaacaaacgtgtacgccgactcctttgtgatccggggcgatgaagtgagacagatcgcaccaggacagaccggaaagatcgcagactacaactataagctgcctgacgatttcacaggctgcgtgatcgcctggaatagcaacaatctggattccaaagtgggcggcaactacaattatctgtacaggctgttccgcaagtccaacctgaagccatttgagcgggacatctccaccgagatctaccaggccggctctacaccctgcaacggcgtggagggcttcaattgttattttcccctgcagtcttacggcttccagcctacaaatggcgtgggctatcagccataccgggtggtggtgctgtcttttgagctgctgcacgcaccagcaaccgtgtgcggccccaagaagagcacacatcatcaccaccaccaccaccactga

SEQ ID NO: 5777 - DNA, 735 bp, Artificial Sequence
  Description of Artificial Sequence: Synthetic polynucleotide
atgggcatcctgccaagcccaggaatgcccgccctgctgtctctggtgagcctgctgtccgtgctgctgatgggatgcgtggcagagacaggcacaaggttccctaacatcaccaatctgtgcccattcggcgaggtgtttaacgccacacgctttgcctccgtgtatgcctggaaccggaagagaatctctaattgcgtggccgactatagcgtgctgtacaatagcgcctccttctctacctttaagtgctatggcgtgagccccaccaagctgaacgatctgtgcttcacaaacgtgtacgccgactcctttgtgatccggggcgatgaagtgagacagatcgcaccaggacagaccggaaagatcgcagactacaactataagctgcctgacgatttcacaggctgcgtgatcgcctggaatagcaacaatctggattccaaagtgggcggcaactacaattatctgtacaggctgttccgcaagtccaacctgaagccatttgagcgggacatctccaccgagatctaccaggccggctctacaccctgcaacggcgtggagggcttcaattgttattttcccctgcagtcttacggcttccagcctacaaatggcgtgggctatcagccataccgggtggtggtgctgatttttgagctgctgcacgcaccagcaaccgtgtgcggccccaagaagagcacacatcatcaccaccaccaccaccactga

SEQ ID NO: 5778 - DNA, 735 bp, Artificial Sequence
  Description of Artificial Sequence: Synthetic polynucleotide
atgggcatcctgccaagcccaggaatgcccgccctgctgtctctggtgagcctgctgtccgtgctgctgatgggatgcgtggcagagacaggcacaaggttccctaacatcaccaatctgtgcccattcggcgaggtgtttaacgccacacgctttgcctccgtgtatgcctggaaccggaagagaatctctaattgcgtggccgactatagcgtgctgtacaatagcgcctccttctctacctttaagtgctatggcgtgagccccaccaagctgaacgatctgtgcttcacaaacgtgtacgccgactcctttgtgatccggggcgatgaagtgagacagatcgcaccaggacagaccggaaagatcgcagactacaactataagctgcctgacgatttcacaggctgcgtgatcgcctggaatagcaacaatctggattccaaagtgggcggcaactacaattatctgtacaggctgttccgcaagtccaacctgaagccatttgagcgggacatctccaccgagatctaccaggccggctctacaccctgcaacggcgtggagggcttcaattgttattttcccctgcagtcttacgttttccagcctacaaatggcgtgggctatcagccataccgggtggtggtgctgtcttttgagctgctgcacgcaccagcaaccgtgtgcggccccaagaagagcacacatcatcaccaccaccaccaccactga

SEQ ID NO: 5779 - DNA, 735 bp, Artificial Sequence
  Description of Artificial Sequence: Synthetic polynucleotide
atgggcatcctgccaagcccaggaatgcccgccctgctgtctctggtgagcctgctgtccgtgctgctgatgggatgcgtggcagagacaggcacaaggttccctaacatcaccaatctgtgcccattcggcgaggtgtttaacgccacacgctttgcctccgtgtatgcctggaaccggaagagaatctctaattgcgtggccgactatagcgtgctgtacaatagcgcctccttctctacctttaagtgctatggcgtgagccccaccaagctgaacgatctgtgcttcacaaacgtgtacgccgactcctttgtgatccggggcgatgaagtgagacagatcgcaccaggacagaccggaaagatcgcagactacaactataagctgcctgacgatttcacaggctgcgtgtttgcctggaatagcaacaatctggattccaaagtgggcggcaactacaattatctgtacaggctgttccgcaagtccaacctgaagccatttgagcgggacatctccaccgagatctaccaggccggctctacaccctgcaacggcgtggagggcttcaattgttattttcccctgcagtcttacggcttccagcctacaaatggcgtgggctatcagccataccgggtggtggtgctgtcttttgagctgctgcacgcaccagcaaccgtgtgcggccccaagaagagcacacatcatcaccaccaccaccaccactga

SEQ ID NO: 5780 - DNA, 735 bp, Artificial Sequence
  Description of Artificial Sequence: Synthetic polynucleotide
atgggcatcctgccaagcccaggaatgcccgccctgctgtctctggtgagcctgctgtccgtgctgctgatgggatgcgtggcagagacaggcacaaggttccctaacatcaccaatctgtgcccattcggcgaggtgtttaacgccacacgctttgcctccgtgtatgcctggaaccggaagagaatctctaattgcgtggccgactatagcgtgctgtacaatagcgcctccttctctacctttaagtgctatggcgtgagccccaccaagctgaacgatctgtgcttcacaaacgtgtacgccgactcctttgtgatccggggcgatgaagtgagacagatcgcaccaggacagaccggaaagatcgcagactacaactataagctgcctgacgatttcacaggctgcgtgatcgcctggaatagcaacaatctggattccaaaccgggcggcaactacaattatctgtacaggctgttccgcaagtccaacctgaagccatttgagcgggacatctccaccgagatctaccaggccggctctacaccctgcaacggcgtggagggcttcaattgttattttcccctgcagtcttacggcttccagcctacaaatggcgtgggctatcagccataccgggtggtggtgctgtcttttgagctgctgcacgcaccagcaaccgtgtgcggccccaagaagagcacacatcatcaccaccaccaccaccactga

SEQ ID NO: 5781 - DNA, 735 bp, Artificial Sequence
  Description of Artificial Sequence: Synthetic polynucleotide
atgggcatcctgccaagcccaggaatgcccgccctgctgtctctggtgagcctgctgtccgtgctgctgatgggatgcgtggcagagacaggcacaaggttccctaacatcaccaatctgtgcccattcggcgaggtgtttaacgccacacgctttgcctccgtgtatgcctggaaccggaagagaatctctaattgcgtggccgactatagcggtctgtacaatagcgcctccttctctacctttaagtgctatggcgtgagccccaccaagctgaacgatctgtgcttcacaaacgtgtacgccgactcctttgtgatccggggcgatgaagtgagacagatcgcaccaggacagaccggaaagatcgcagactacaactataagctgcctgacgatttcacaggctgcgtgatcgcctggaatagcaacaatctggattccaaagtgggcggcaactacaattatctgtacaggctgttccgcaagtccaacctgaagccatttgagcgggacatctccaccgagatctaccaggccggctctacaccctgcaacggcgtggagggcttcaattgttattttcccctgcagtcttacggcttccagcctacaaatggcgtgggctatcagccataccgggtggtggtgctgtcttttgagctgctgcacgcaccagcaaccgtgtgcggccccaagaagagcacacatcatcaccaccaccaccaccactga

SEQ ID NO: 5782 - DNA, 735 bp, Artificial Sequence
  Description of Artificial Sequence: Synthetic polynucleotide
atgggcatcctgccaagcccaggaatgcccgccctgctgtctctggtgagcctgctgtccgtgctgctgatgggatgcgtggcagagacaggcacaaggttccctaacatcaccaatctgtgcccattcggcgaggtgtttaacgccacacgctttgcctccgtgtatgcctggaaccggaagagaatctctaattgcgtggccgactatagcgtgctgtacaatagcgcctccttctctacctttaagtgctatggcgtgagccccaccaagctgaacgatctgtgcttcacaaacgtgtacgccgactcctttgtgatccggggcgatgaagtgagacagatcgcaccaggacagaccggaaagatcgcagactacaactataagctgcctgacgatttcacaggctgcgtgatcgcctggaatagcaacaatctggattccaaagtgggcggcaactacaattatctgtacaggctgttccgcaagtccaacctgaagccatttgagcggtttatctccaccgagatctaccaggccggctctacaccctgcaacggcgtggagggcttcaattgttattttcccctgcagtcttacggcttccagcctacaaatggcgtgggctatcagccataccgggtggtggtgctgtcttttgagctgctgcacgcaccagcaaccgtgtgcggccccaagaagagcacacatcatcaccaccaccaccaccactga

SEQ ID NO: 5783 - DNA, 735 bp, Artificial Sequence
  Description of Artificial Sequence: Synthetic polynucleotide
atgggcatcctgccaagcccaggaatgcccgccctgctgtctctggtgagcctgctgtccgtgctgctgatgggatgcgtggcagagacaggcacaaggttccctaacatcaccaatctgtgcccattcggcgaggtgtttaacgccacacgctttgcctccgtgtatgcctggaaccggaagagaatctctaattgcgtggccgactatagcgtgctgtacaatagcgcctccttctctacctttaagtgctatggcgtgagccccaccaagctgaacgatctgtgcttcacaaacgtgtacgccgactcctttgtgatccggggcgatgaagtgagacagatcgcaccaggacagaccggaaagatcgcagactacaactataagctgcctgacgatttcacaggctgcgtgatcgcctggaatagcaacaatctggattccaaagtgggcggcaactacaattatctgtacaggctgttccgcaagtccaacctgaagccatttgagcgggacatctccaccgaggcgtaccaggccggctctacaccctgcaacggcgtggagggcttcaattgttattttcccctgcagtcttacggcttccagcctacaaatggcgtgggctatcagccataccgggtggtggtgctgtcttttgagctgctgcacgcaccagcaaccgtgtgcggccccaagaagagcacacatcatcaccaccaccaccaccactga

SEQ ID NO: 5784 - DNA, 735 bp, Artificial Sequence
  Description of Artificial Sequence: Synthetic polynucleotide
atgggcatcctgccaagcccaggaatgcccgccctgctgtctctggtgagcctgctgtccgtgctgctgatgggatgcgtggcagagacaggcacaaggttccctaacatcaccaatctgtgcccattcggcgaggtgtttaacgccacacgctttgcctccgtgtatgcctggaaccggaagagaatctctaattgcgtggccgactatagcgtgctgtacaatagcgcctccttctctacctttaagtgctatggcgtgagccccaccaagctgaacgatctgtgcttcacaaacgtgtacgccgactcctttgtgatccggggcgatgaagtgagacagatcgcaccaggacagaccggaaagatcgcagactacgtttataagctgcctgacgatttcacaggctgcgtgatcgcctggaatagcaacaatctggattccaaagtgggcggcaactacaattatctgtacaggctgttccgcaagtccaacctgaagccatttgagcgggacatctccaccgagatctaccaggccggctctacaccctgcaacggcgtggagggcttcaattgttattttcccctgcagtcttacggcttccagcctacaaatggcgtgggctatcagccataccgggtggtggtgctgtcttttgagctgctgcacgcaccagcaaccgtgtgcggccccaagaagagcacacatcatcaccaccaccaccaccactga

SEQ ID NO: 5785 - DNA, 735 bp, Artificial Sequence
  Description of Artificial Sequence: Synthetic polynucleotide
atgggcatcctgccaagcccaggaatgcccgccctgctgtctctggtgagcctgctgtccgtgctgctgatgggatgcgtggcagagacaggcacaaggttccctgtaatcaccaatctgtgcccattcggcgaggtgtttaacgccacacgctttgcctccgtgtatgcctggaaccggaagagaatctctaattgcgtggccgactatagcgtgctgtacaatagcgcctccttctctacctttaagtgctatggcgtgagccccaccaagctgaacgatctgtgcttcacaaacgtgtacgccgactcctttgtgatccggggcgatgaagtgagacagatcgcaccaggacagaccggaaagatcgcagactacaactataagctgcctgacgatttcacaggctgcgtgatcgcctggaatagcaacaatctggattccaaagtgggcggcaactacaattatctgtacaggctgttccgcaagtccaacctgaagccatttgagcgggacatctccaccgagatctaccaggccggctctacaccctgcaacggcgtggagggcttcaattgttattttcccctgcagtcttacggcttccagcctacaaatggcgtgggctatcagccataccgggtggtggtgctgtcttttgagctgctgcacgcaccagcaaccgtgtgcggccccaagaagagcacacatcatcaccaccaccaccaccactga

SEQ ID NO: 5786 - DNA, 735 bp, Artificial Sequence
  Description of Artificial Sequence: Synthetic polynucleotide
atgggcatcctgccaagcccaggaatgcccgccctgctgtctctggtgagcctgctgtccgtgctgctgatgggatgcgtggcagagacaggcacaaggttccctaacatcaccaatctgtgcccattcggcgaggtgtttaacgccacacgctttgcctccgtgtatgcctggaaccggaagagaatctctaattgcgtggccgactatagcgtgctgtacaatagcgcctccttctctacctttaagtgctatggcgtgagccccaccaagctgaacgatctgtgcttcacaaacgtgtacgccgactcctttgtgatccggggcgatgaagtgagacagatcgcaccaggacagaccggaaagatcgcagactacaactataagctgcctgacgatttcacaggctgcgtgatcgcctggaatagcaacaatctggattccaaagagggcggcaactacaattatctgtacaggctgttccgcaagtccaacctgaagccatttgagcgggacatctccaccgagatctaccaggccggctctacaccctgcaacggcgtggagggcttcaattgttattttcccctgcagtcttacggcttccagcctacaaatggcgtgggctatcagccataccgggtggtggtgctgtcttttgagctgctgcacgcaccagcaaccgtgtgcggccccaagaagagcacacatcatcaccaccaccaccaccactga

SEQ ID NO: 5787 - DNA, 735 bp, Artificial Sequence
  Description of Artificial Sequence: Synthetic polynucleotide
atgggcatcctgccaagcccaggaatgcccgccctgctgtctctggtgagcctgctgtccgtgctgctgatgggatgcgtggcagagacaggcacaaggttccctaacatcaccaatctgtgcccattcggcgaggtgtttaacgccacacgctttgcctccgtgtatgcctggaaccggaagagaatctctaattgcgtggccgactatagcgtgctgtacaatagcgcctccttctctacctttaagtgctatggcgtgagccccaccaagctgaacgatctgtgcttcacaaacatttacgccgactcctttgtgatccggggcgatgaagtgagacagatcgcaccaggacagaccggaaagatcgcagactacaactataagctgcctgacgatttcacaggctgcgtgatcgcctggaatagcaacaatctggattccaaagtgggcggcaactacaattatctgtacaggctgttccgcaagtccaacctgaagccatttgagcgggacatctccaccgagatctaccaggccggctctacaccctgcaacggcgtggagggcttcaattgttattttcccctgcagtcttacggcttccagcctacaaatggcgtgggctatcagccataccgggtggtggtgctgtcttttgagctgctgcacgcaccagcaaccgtgtgcggccccaagaagagcacacatcatcaccaccaccaccaccactga

SEQ ID NO: 5788 - DNA, 735 bp, Artificial Sequence
  Description of Artificial Sequence: Synthetic polynucleotide
atgggcatcctgccaagcccaggaatgcccgccctgctgtctctggtgagcctgctgtccgtgctgctgatgggatgcgtggcagagacaggcacaaggttccctaacatcaccaatctgtgcccattcggcgaggtgtttaacgccacacgctttgcctccgtgtatgcctggaaccggaagagaatctctaattgcgtggccgactatagcgtgctgtacaatagcgcctccttctctacctttaagtgctatggcgtgagccccaccaagctgaacgatctgtgcttcacaaacgtgtacgccgactcctttgtgatccggggcgatgaagtgagacagatcgcaccaggacagaccggaaagatcgcagactacaactataagctgcctgacgatttcacaggctgcgtgatcgcctggaatagcaacaatctggattccaaagtgggcggcaactacaattatctgtacaggctgttccgcaagtccaacctgaagccatttgagcgggacatctccaccgagaaataccaggccggctctacaccctgcaacggcgtggagggcttcaattgttattttcccctgcagtcttacggcttccagcctacaaatggcgtgggctatcagccataccgggtggtggtgctgtcttttgagctgctgcacgcaccagcaaccgtgtgcggccccaagaagagcacacatcatcaccaccaccaccaccactga

SEQ ID NO: 5789 - DNA, 735 bp, Artificial Sequence
  Description of Artificial Sequence: Synthetic polynucleotide
atgggcatcctgccaagcccaggaatgcccgccctgctgtctctggtgagcctgctgtccgtgctgctgatgggatgcgtggcagagacaggcacaaggttccctaacatcaccaatctgtgcccattcggcgaggtgtttaacgccacacgctttgcctccgtgtatgcctggaaccggaagagaatctctaattgcgtggccgactatagcgtgctgtacaatagcgcctccttctctacctttaagtgctatggcgtgagccccaccaagctgaacgatctgtgcttcacaaacgtgtacgccgactcctttgtgatccggggcgatgaagtgagacagatcgcaccaggacagaccggaaagatcgcagactacaactataagctgcctgacgatttcacaggctgcgtgatcgcctggaatagcaacaatctggattccaaagtgggcggcaactacaattatctgtacaggctgttccgcaagtccaacctgaagccatttgagcgggacatctccgtagagatctaccaggccggctctacaccctgcaacggcgtggagggcttcaattgttattttcccctgcagtcttacggcttccagcctacaaatggcgtgggctatcagccataccgggtggtggtgctgtcttttgagctgctgcacgcaccagcaaccgtgtgcggccccaagaagagcacacatcatcaccaccaccaccaccactga

SEQ ID NO: 5790 - DNA, 735 bp, Artificial Sequence
  Description of Artificial Sequence: Synthetic polynucleotide
atgggcatcctgccaagcccaggaatgcccgccctgctgtctctggtgagcctgctgtccgtgctgctgatgggatgcgtggcagagacaggcacaaggttccctaacatcaccaatctgtgcccattcggcgaggtgtttaacgccacacgctttgcctccgtgtatgcctggaaccggaagagaatctctaattgcgtggccgactatagcgtgctgtacaatagcgcctccttctctacctttaagtgctatggcgtgagccccaccaagctgaacgatctgtgcttcacaaacgtgtacgccgacacttttgtgatccggggcgatgaagtgagacagatcgcaccaggacagaccggaaagatcgcagactacaactataagctgcctgacgatttcacaggctgcgtgatcgcctggaatagcaacaatctggattccaaagtgggcggcaactacaattatctgtacaggctgttccgcaagtccaacctgaagccatttgagcgggacatctccaccgagatctaccaggccggctctacaccctgcaacggcgtggagggcttcaattgttattttcccctgcagtcttacggcttccagcctacaaatggcgtgggctatcagccataccgggtggtggtgctgtcttttgagctgctgcacgcaccagcaaccgtgtgcggccccaagaagagcacacatcatcaccaccaccaccaccactga

SEQ ID NO: 5791 - DNA, 735 bp, Artificial Sequence
  Description of Artificial Sequence: Synthetic polynucleotide
atgggcatcctgccaagcccaggaatgcccgccctgctgtctctggtgagcctgctgtccgtgctgctgatgggatgcgtggcagagacaggcacaaggttccctaacatcaccaatctgtgcccattcggcgaggtgtttaacgccacacgctttgcctccgtgtatgcctggaaccggaagagaatctctaattgcgtggccgactggagcgtgctgtacaatagcgcctccttctctacctttaagtgctatggcgtgagccccaccaagctgaacgatctgtgcttcacaaacgtgtacgccgactcctttgtgatccggggcgatgaagtgagacagatcgcaccaggacagaccggaaagatcgcagactacaactataagctgcctgacgatttcacaggctgcgtgatcgcctggaatagcaacaatctggattccaaagtgggcggcaactacaattatctgtacaggctgttccgcaagtccaacctgaagccatttgagcgggacatctccaccgagatctaccaggccggctctacaccctgcaacggcgtggagggcttcaattgttattttcccctgcagtcttacggcttccagcctacaaatggcgtgggctatcagccataccgggtggtggtgctgtcttttgagctgctgcacgcaccagcaaccgtgtgcggccccaagaagagcacacatcatcaccaccaccaccaccactga

SEQ ID NO: 5792 - DNA, 735 bp, Artificial Sequence
  Description of Artificial Sequence: Synthetic polynucleotide
atgggcatcctgccaagcccaggaatgcccgccctgctgtctctggtgagcctgctgtccgtgctgctgatgggatgcgtggcagagacaggcacaaggttccctaacatcaccaatctgtgcccattcggcgaggtgtttaacgccacacgctttgcctccgtgtatgcctggaaccggaagagactttctaattgcgtggccgactatagcgtgctgtacaatagcgcctccttctctacctttaagtgctatggcgtgagccccaccaagctgaacgatctgtgcttcacaaacgtgtacgccgactcctttgtgatccggggcgatgaagtgagacagatcgcaccaggacagaccggaaagatcgcagactacaactataagctgcctgacgatttcacaggctgcgtgatcgcctggaatagcaacaatctggattccaaagtgggcggcaactacaattatctgtacaggctgttccgcaagtccaacctgaagccatttgagcgggacatctccaccgagatctaccaggccggctctacaccctgcaacggcgtggagggcttcaattgttattttcccctgcagtcttacggcttccagcctacaaatggcgtgggctatcagccataccgggtggtggtgctgtcttttgagctgctgcacgcaccagcaaccgtgtgcggccccaagaagagcacacatcatcaccaccaccaccaccactga

SEQ ID NO: 5793 - DNA, 735 bp, Artificial Sequence
  Description of Artificial Sequence: Synthetic polynucleotide
atgggcatcctgccaagcccaggaatgcccgccctgctgtctctggtgagcctgctgtccgtgctgctgatgggatgcgtggcagagacaggcacaaggttccctaacatcaccaatctgtgcccattcggcgaggtgtttaacgccacacgctttgcctccgtgtatgcctggaaccggaagagaatctctaattgcgtggccgactatagcgtgctgtactcaagcgcctccttctctacctttaagtgctatggcgtgagccccaccaagctgaacgatctgtgcttcacaaacgtgtacgccgactcctttgtgatccggggcgatgaagtgagacagatcgcaccaggacagaccggaaagatcgcagactacaactataagctgcctgacgatttcacaggctgcgtgatcgcctggaatagcaacaatctggattccaaagtgggcggcaactacaattatctgtacaggctgttccgcaagtccaacctgaagccatttgagcgggacatctccaccgagatctaccaggccggctctacaccctgcaacggcgtggagggcttcaattgttattttcccctgcagtcttacggcttccagcctacaaatggcgtgggctatcagccataccgggtggtggtgctgtcttttgagctgctgcacgcaccagcaaccgtgtgcggccccaagaagagcacacatcatcaccaccaccaccaccactga

SEQ ID NO: 5794 - DNA, 735 bp, Artificial Sequence
  Description of Artificial Sequence: Synthetic polynucleotide
atgggcatcctgccaagcccaggaatgcccgccctgctgtctctggtgagcctgctgtccgtgctgctgatgggatgcgtggcagagacaggcacaaggttccctaacatcaccaatctgtgcccattcggcgaggtgtttaacgccacacgctttgcctccgtgtatgcctggaaccggaagagaatctctaattgcgtggccgactatagcgtgctgtacaatagcgcctccttctctacctttaagtgctatggcgtgagccccaccaagctgaacgatctgtgcttcacaaacgtgtacgccgactcctttgtgatccggggcgatgaagtgagacagatcgcaccaggacagaccggaaagatcgcagactacaactataagctgcctgacgatttcacaggctgcgtgatcgcctggaatagcaacaatctggattccaaagtgggcggcaactacaattatctgtacaggctgttccgcaagtccaacctgaagccatttgagcgggacatctccaccgaggtctaccaggccggctctacaccctgcaacggcgtggagggcttcaattgttattttcccctgcagtcttacggcttccagcctacaaatggcgtgggctatcagccataccgggtggtggtgctgtcttttgagctgctgcacgcaccagcaaccgtgtgcggccccaagaagagcacacatcatcaccaccaccaccaccactga

SEQ ID NO: 5795 - DNA, 735 bp, Artificial Sequence
  Description of Artificial Sequence: Synthetic polynucleotide
atgggcatcctgccaagcccaggaatgcccgccctgctgtctctggtgagcctgctgtccgtgctgctgatgggatgcgtggcagagacaggcacaaggttccctaacatcaccaatctgtgcccactcggcgaggtgtttaacgccacacgctttgcctccgtgtatgcctggaaccggaagagaatctctaattgcgtggccgactatagcgtgctgtacaatagcgcctccttctctacctttaagtgctatggcgtgagccccaccaagctgaacgatctgtgcttcacaaacgtgtacgccgactcctttgtgatccggggcgatgaagtgagacagatcgcaccaggacagaccggaaagatcgcagactacaactataagctgcctgacgatttcacaggctgcgtgatcgcctggaatagcaacaatctggattccaaagtgggcggcaactacaattatctgtacaggctgttccgcaagtccaacctgaagccatttgagcgggacatctccaccgagatctaccaggccggctctacaccctgcaacggcgtggagggcttcaattgttattttcccctgcagtcttacggcttccagcctacaaatggcgtgggctatcagccataccgggtggtggtgctgtcttttgagctgctgcacgcaccagcaaccgtgtgcggccccaagaagagcacacatcatcaccaccaccaccaccactga

SEQ ID NO: 5796 - DNA, 735 bp, Artificial Sequence
  Description of Artificial Sequence: Synthetic polynucleotide
atgggcatcctgccaagcccaggaatgcccgccctgctgtctctggtgagcctgctgtccgtgctgctgatgggatgcgtggcagagacaggcacaaggttccctaacatcaccaatctgtgcccattcggcgaggtgtttaacgccacacgctttgcctccgtgtatgcctggaaccggaagagaatctctaattgcgtggccgactatagcgtgctgtacaatagcgcctccttctctacctttaagtgctatggcgtgagccccaccaagctgaacgatctgtgcttcacaaacgtgtacgccgactcctttgtgatccggggcgatgaagtgagacagatcgcaccaggacagaccggaaagatcgcagactacaactataagctgcctgacgatttcacaggctgcgtgatcgcctggaatagcaacaatctggattccaaagtgggcggcaactacaattatctgtacaggctgttccgcaagtccaacctgaagccatttgagcgggacatctccaccgagacgtaccaggccggctctacaccctgcaacggcgtggagggcttcaattgttattttcccctgcagtcttacggcttccagcctacaaatggcgtgggctatcagccataccgggtggtggtgctgtcttttgagctgctgcacgcaccagcaaccgtgtgcggccccaagaagagcacacatcatcaccaccaccaccaccactga

SEQ ID NO: 5797 - DNA, 735 bp, Artificial Sequence
  Description of Artificial Sequence: Synthetic polynucleotide
atgggcatcctgccaagcccaggaatgcccgccctgctgtctctggtgagcctgctgtccgtgctgctgatgggatgcgtggcagagacaggcacaaggttccctaacatcaccaatctgtgcccattcggcgaggtgtttaacgccacacgctttgcctccgtgtatgcctggaaccggaagagaatctctaattgcgtggccgactatagcgtgctgtacaatagcgcctccttctctacctttaagtgctatggcgtgagccccaccaagctgaacgatctgtgcttcacaaacgtgtacgccgactcctttgtgatccggggcgatgaagtgagacagatcgcaccaggacagaccggaaagatcgcagactacaactataagctgcctgacgatttcacaggctgcgtgatcgcctggaatagcaacaatctggattccaaagtgggcggcaactacaattatctgtacaggctgttccgcaagtccaacctgaagccatttgagcgggacatctccaccgagatctaccaggccggctctacaccctgcaacggcgtggagggcttcaatgcgtattttcccctgcagtcttacggcttccagcctacaaatggcgtgggctatcagccataccgggtggtggtgctgtcttttgagctgctgcacgcaccagcaaccgtgtgcggccccaagaagagcacacatcatcaccaccaccaccaccactga

SEQ ID NO: 5798 - DNA, 735 bp, Artificial Sequence
  Description of Artificial Sequence: Synthetic polynucleotide
atgggcatcctgccaagcccaggaatgcccgccctgctgtctctggtgagcctgctgtccgtgctgctgatgggatgcgtggcagagacaggcacaaggttccctaacatcaccaatctgtgcccattcggcgaggtgtttaacgccacacgctttgcctccgtgtatgcctggaaccggaagagaatctctaattgcgtggccgactatagcgtgctgtacaatagcgcctccttctctacctttaagtgctatggcgtgagccccaccaagctgaacgatctgtgcttcacaaacgtgtacgccgactcctttgtgatccggggcgatcaggtgagacagatcgcaccaggacagaccggaaagatcgcagactacaactataagctgcctgacgatttcacaggctgcgtgatcgcctggaatagcaacaatctggattccaaagtgggcggcaactacaattatctgtacaggctgttccgcaagtccaacctgaagccatttgagcgggacatctccaccgagatctaccaggccggctctacaccctgcaacggcgtggagggcttcaattgttattttcccctgcagtcttacggcttccagcctacaaatggcgtgggctatcagccataccgggtggtggtgctgtcttttgagctgctgcacgcaccagcaaccgtgtgcggccccaagaagagcacacatcatcaccaccaccaccaccactga

SEQ ID NO: 5799 - DNA, 735 bp, Artificial Sequence
  Description of Artificial Sequence: Synthetic polynucleotide
atgggcatcctgccaagcccaggaatgcccgccctgctgtctctggtgagcctgctgtccgtgctgctgatgggatgcgtggcagagacaggcacaaggttccctaacatcaccaatctgtgcccattcggcgaggtgtttaacgccacacgctttgcctccgtgtatgcctggaaccggaagagaatctctaattgcgtggccgactatagcgtgctgtacaatagcgcctccttctctacctttaagtgctatggcgtgagccccaccaagctgaacgatctgtgcttcacaaacgtgtacgccgactcctttgtgatccggggcgatgaagtgagacagatcgcaccaggacagaccggaaagatcgcagactacaactataagctgcctgacgatttcacaggctgcgtgatcgcctggaatagcaacaatctggattccaaagtgggcggcaactacaattatctgtacaggctgttccgcaagtccaacctgaagccatttgagcgggacatctccaccgagatctaccaggccggctctacaccctgcaacggcgtggagggcttcaatcgttattttcccctgcagtcttacggcttccagcctacaaatggcgtgggctatcagccataccgggtggtggtgctgtcttttgagctgctgcacgcaccagcaaccgtgtgcggccccaagaagagcacacatcatcaccaccaccaccaccactga

SEQ ID NO: 5800 - DNA, 735 bp, Artificial Sequence
  Description of Artificial Sequence: Synthetic polynucleotide
atgggcatcctgccaagcccaggaatgcccgccctgctgtctctggtgagcctgctgtccgtgctgctgatgggatgcgtggcagagacaggcacaaggttccctaacatcaccaatctgtgcccattcggcgaggtgtttaacgccacacgctttgcctccgtgtatgcctggaaccggaagagaatctctaattgcgtggccgactatagcgtgctgtacaatagcgcctccttctctacctttaagtgctatggcgtgagccccaccaagctgaacgatctgtgcttcacaaacgtgtacgccgactcctttgtgatccggggcgatgaagtgagacagatcgcaccaggacagaccggaaagatcgcagactacaactataagctgcctgacgatttcacaggctgcgtgatcgcctggaatagcaacaatctggattccaaagtgggcggcaactacaattatctgtacaggctgttccgcaagtccaacctgaagccatttgagcgggacatctccaccgagatctaccaggccggctctacaccctgcaacggcgtggagggcttcaattattattttcccctgcagtcttacggcttccagcctacaaatggcgtgggctatcagccataccgggtggtggtgctgtcttttgagctgctgcacgcaccagcaaccgtgtgcggccccaagaagagcacacatcatcaccaccaccaccaccactga

SEQ ID NO: 5801 - DNA, 735 bp, Artificial Sequence
  Description of Artificial Sequence: Synthetic polynucleotide
atgggcatcctgccaagcccaggaatgcccgccctgctgtctctggtgagcctgctgtccgtgctgctgatgggatgcgtggcagagacaggcacaaggttccctaacatcaccaatctgtgcccattcggcgaggtgtttaacgccacacgctttgcctccgtgtatgcctggaaccggaagagaatctctaattgcgtggccgactatagcgtgctgtacaatagcgcctccttctctacctttaagtgctatggcgtgagccccaccaagctgaacgatctgtgcttcacaaacgtgtacgccgactcctttgtgatccggggcgatgaagtgagacagatcgcaccaggacagaccggaaagatcgcagactacaactataagctgcctgacgatttcacaggctgcgtgatcgcctggaatagcaacaatctggattccaaagtgggcggcaactacaattatctgtacaggctgttccgcaagtccaacctgaagccatttgagcgggacatctccggggagatctaccaggccggctctacaccctgcaacggcgtggagggcttcaattgttattttcccctgcagtcttacggcttccagcctacaaatggcgtgggctatcagccataccgggtggtggtgctgtcttttgagctgctgcacgcaccagcaaccgtgtgcggccccaagaagagcacacatcatcaccaccaccaccaccactga

SEQ ID NO: 5802 - DNA, 735 bp, Artificial Sequence
  Description of Artificial Sequence: Synthetic polynucleotide
atgggcatcctgccaagcccaggaatgcccgccctgctgtctctggtgagcctgctgtccgtgctgctgatgggatgcgtggcagagacaggcacaaggttccctaacatcaccaatctgtgcccattcggcgaggtgtttaacgccacacgctttgcctccgtgtatgcctggaaccggaagagaatctctaattgcgtggccgactatagcgtgctgtacaatagcgcctccttctctacctttaagtgctatggcgtgagccccaccaagctgaacgatctgtgcttcacaaacgtgtacgccgactcctttgtgatccggggcgatgaagtgagacagatcgcaccaggacagaccggaaagatcgcagactacaactataagctgcctgacgatttcacaggctgcgtgatcgcctggaatagcaacgatctggattccaaagtgggcggcaactacaattatctgtacaggctgttccgcaagtccaacctgaagccatttgagcgggacatctccaccgagatctaccaggccggctctacaccctgcaacggcgtggagggcttcaattgttattttcccctgcagtcttacggcttccagcctacaaatggcgtgggctatcagccataccgggtggtggtgctgtcttttgagctgctgcacgcaccagcaaccgtgtgcggccccaagaagagcacacatcatcaccaccaccaccaccactga

SEQ ID NO: 5803 - DNA, 735 bp, Artificial Sequence
  Description of Artificial Sequence: Synthetic polynucleotide
atgggcatcctgccaagcccaggaatgcccgccctgctgtctctggtgagcctgctgtccgtgctgctgatgggatgcgtggcagagacaggcacaaggttccctaacatcaccaatctgtgcccattcggcgaggtgtttaacgccacacgctttgcccccgtgtatgcctggaaccggaagagaatctctaattgcgtggccgactatagcgtgctgtacaatagcgcctccttctctacctttaagtgctatggcgtgagccccaccaagctgaacgatctgtgcttcacaaacgtgtacgccgactcctttgtgatccggggcgatgaagtgagacagatcgcaccaggacagaccggaaagatcgcagactacaactataagctgcctgacgatttcacaggctgcgtgatcgcctggaatagcaacaatctggattccaaagtgggcggcaactacaattatctgtacaggctgttccgcaagtccaacctgaagccatttgagcgggacatctccaccgagatctaccaggccggctctacaccctgcaacggcgtggagggcttcaattgttattttcccctgcagtcttacggcttccagcctacaaatggcgtgggctatcagccataccgggtggtggtgctgtcttttgagctgctgcacgcaccagcaaccgtgtgcggccccaagaagagcacacatcatcaccaccaccaccaccactga

SEQ ID NO: 5804 - DNA, 735 bp, Artificial Sequence
  Description of Artificial Sequence: Synthetic polynucleotide
atgggcatcctgccaagcccaggaatgcccgccctgctgtctctggtgagcctgctgtccgtgctgctgatgggatgcgtggcagagacaggcacaaggttccctaacatcaccaatctgtgcccattcggcgaggtgtttaacgccacacgctttgcctccgtgtatgcctggaaccggaagagaatctctaattgcgtggccgactatagcgtgctgtacaatagcgcctccttctctacctttaagtgctatggcgtgagccccaccaagctgaacgatctgtgcttcacaaacgtgtacgccgactcctttgtgatccggggcgatgaagtgagacagatcgcaccaggacagaccggaaagatccgagactacaactataagctgcctgacgatttcacaggctgcgtgatcgcctggaatagcaacaatctggattccaaagtgggcggcaactacaattatctgtacaggctgttccgcaagtccaacctgaagccatttgagcgggacatctccaccgagatctaccaggccggctctacaccctgcaacggcgtggagggcttcaattgttattttcccctgcagtcttacggcttccagcctacaaatggcgtgggctatcagccataccgggtggtggtgctgtcttttgagctgctgcacgcaccagcaaccgtgtgcggccccaagaagagcacacatcatcaccaccaccaccaccactga

SEQ ID NO: 5805 - DNA, 735 bp, Artificial Sequence
  Description of Artificial Sequence: Synthetic polynucleotide
atgggcatcctgccaagcccaggaatgcccgccctgctgtctctggtgagcctgctgtccgtgctgctgatgggatgcgtggcagagacaggcacaaggttccctaacatcaccaatctgtgcccattcggcgaggtgtttaacgccacacgctttgcctccgtgtatgcctggaaccggaagagaatctctaattgcgtggccgactatagcgtgctgtacaatagcgcctccttctctacctttaagtgctatggcgtgagccccaccaagctgaacgatctgtgcttcgtaaacgtgtacgccgactcctttgtgatccggggcgatgaagtgagacagatcgcaccaggacagaccggaaagatcgcagactacaactataagctgcctgacgatttcacaggctgcgtgatcgcctggaatagcaacaatctggattccaaagtgggcggcaactacaattatctgtacaggctgttccgcaagtccaacctgaagccatttgagcgggacatctccaccgagatctaccaggccggctctacaccctgcaacggcgtggagggcttcaattgttattttcccctgcagtcttacggcttccagcctacaaatggcgtgggctatcagccataccgggtggtggtgctgtcttttgagctgctgcacgcaccagcaaccgtgtgcggccccaagaagagcacacatcatcaccaccaccaccaccactga

SEQ ID NO: 5806 - DNA, 735 bp, Artificial Sequence
  Description of Artificial Sequence: Synthetic polynucleotide
atgggcatcctgccaagcccaggaatgcccgccctgctgtctctggtgagcctgctgtccgtgctgctgatgggatgcgtggcagagacaggcacaaggttccctaacatcaccaatctgtgcccattcggcgaggtgtttaacgccacacgctttgcctccgtgtatgcctggaaccggaagagaatctctaattgcgtggccgactatagcgtgctgtacaatagcgcctccttctctacctttaagtgctatggcgtgagccccaccaagctgaacgatctgtgcttcacaaacgtgtacgccgactcctttgtgatccggggcgatgaagtgagacagatcgcaccaggacagaccggaaagatcgcagactacaactataagctgcctgacgatttcacaggctgcgtgatcgcctggaatagcaacaatctggattccaaagtgggcggcaactacaattatctgtacaggctgttccgcaagtccaacctgaagccatttgagcgggacatctccaccttgatctaccaggccggctctacaccctgcaacggcgtggagggcttcaattgttattttcccctgcagtcttacggcttccagcctacaaatggcgtgggctatcagccataccgggtggtggtgctgtcttttgagctgctgcacgcaccagcaaccgtgtgcggccccaagaagagcacacatcatcaccaccaccaccaccactga

SEQ ID NO: 5807 - DNA, 735 bp, Artificial Sequence
  Description of Artificial Sequence: Synthetic polynucleotide
atgggcatcctgccaagcccaggaatgcccgccctgctgtctctggtgagcctgctgtccgtgctgctgatgggatgcgtggcagagacaggcacaaggttccctaacatcaccaatctgtgcccattcggcgaggtgtttaacgccacacgctttgcctccgtgtatgcctggaaccggaagagaatctctaattgcgtggccgactatagcgtgctgtacaatagcgcctccttctctacctttaagtgctatggcgtgagccccaccaagctgaacgatctgtgcttcacaaacgtgtacgccgactcctttgtgatccggggcgatgaagtgagacagatcgcaccaggacagaccggaaagatcgcagactacaactataagctgcctgacgatttcacaggctgcgtgatcgcctggaatagcaacaatctggattccaaagtgggcggcaactacaattatctgtacaggctgttccgcaagtccaacctgaagccatttgagcgggacatctcctgtgagatctaccaggccggctctacaccctgcaacggcgtggagggcttcaattgttattttcccctgcagtcttacggcttccagcctacaaatggcgtgggctatcagccataccgggtggtggtgctgtcttttgagctgctgcacgcaccagcaaccgtgtgcggccccaagaagagcacacatcatcaccaccaccaccaccactga

SEQ ID NO: 5808 - DNA, 735 bp, Artificial Sequence
  Description of Artificial Sequence: Synthetic polynucleotide
atgggcatcctgccaagcccaggaatgcccgccctgctgtctctggtgagcctgctgtccgtgctgctgatgggatgcgtggcagagacaggcacaaggttccctaacatcaccaatctgtgcccattcggcgaggtgtttaacgccacacgctttgcctccgtgtatgcctggaaccggaagagaatctctaattgcgtggccgactatagcgtgctgtacaatagcgcctccttctctacctttaagtgctatggcgtgagccccaccaagctgaacgatctgtgcttcacaaacgtgtacgccgactcctttgtgatccggggcgatgaagtgagacagatcgcaccaggacagaccggaaagatcgcagactacaactataagctgcctgacgatttcacaggctgcgtgatcgcctggaatagcaaaaatctggattccaaagtgggcggcaactacaattatctgtacaggctgttccgcaagtccaacctgaagccatttgagcgggacatctccaccgagatctaccaggccggctctacaccctgcaacggcgtggagggcttcaattgttattttcccctgcagtcttacggcttccagcctacaaatggcgtgggctatcagccataccgggtggtggtgctgtcttttgagctgctgcacgcaccagcaaccgtgtgcggccccaagaagagcacacatcatcaccaccaccaccaccactga

SEQ ID NO: 5809 - DNA, 735 bp, Artificial Sequence
  Description of Artificial Sequence: Synthetic polynucleotide
atgggcatcctgccaagcccaggaatgcccgccctgctgtctctggtgagcctgctgtccgtgctgctgatgggatgcgtggcagagacaggcacaaggttccctaacatcaccaatctgtgcccattcggcgaggtgtttaacgccacacgctttgcctccgtgtatgcctggaaccggaagagatactctaattgcgtggccgactatagcgtgctgtacaatagcgcctccttctctacctttaagtgctatggcgtgagccccaccaagctgaacgatctgtgcttcacaaacgtgtacgccgactcctttgtgatccggggcgatgaagtgagacagatcgcaccaggacagaccggaaagatcgcagactacaactataagctgcctgacgatttcacaggctgcgtgatcgcctggaatagcaacaatctggattccaaagtgggcggcaactacaattatctgtacaggctgttccgcaagtccaacctgaagccatttgagcgggacatctccaccgagatctaccaggccggctctacaccctgcaacggcgtggagggcttcaattgttattttcccctgcagtcttacggcttccagcctacaaatggcgtgggctatcagccataccgggtggtggtgctgtcttttgagctgctgcacgcaccagcaaccgtgtgcggccccaagaagagcacacatcatcaccaccaccaccaccactga

SEQ ID NO: 5810 - DNA, 735 bp, Artificial Sequence
  Description of Artificial Sequence: Synthetic polynucleotide
atgggcatcctgccaagcccaggaatgcccgccctgctgtctctggtgagcctgctgtccgtgctgctgatgggatgcgtggcagagacaggcacaaggttccctaacatcaccaatctgtgcccattcggcgaggtgtttaacgccacacgctttgcctccgtgtatgcctggaaccggaagagaatctctaattgcgtggccgactatagcgtgctgtacaatagcgcctccttctctacctttaagtgctatggcgtgagccccaccaagctgaacgatctgtgcttcacaaacgtgtacgccgactcctttgtgatccggggcgatgaagtgagacagatcgcaccaggacagaccggaaagatcgcagactacaactataagctgcctgacgatttcacaggctgcgtgatcgcctggaatagcaacaatctggattccaaagtgggcggcaactacaattatctgtacaggctgttccgcaagtccaacctgaagccatttgagcgggacatcactaccgagatctaccaggccggctctacaccctgcaacggcgtggagggcttcaattgttattttcccctgcagtcttacggcttccagcctacaaatggcgtgggctatcagccataccgggtggtggtgctgtcttttgagctgctgcacgcaccagcaaccgtgtgcggccccaagaagagcacacatcatcaccaccaccaccaccactga

SEQ ID NO: 5811 - DNA, 735 bp, Artificial Sequence
  Description of Artificial Sequence: Synthetic polynucleotide
atgggcatcctgccaagcccaggaatgcccgccctgctgtctctggtgagcctgctgtccgtgctgctgatgggatgcgtggcagagacaggcacaaggttccctaacatcaccaatctgtgcccattcggcgaggtgtttaacgccacacgctttgcctccgtgtatgcctggaaccggaagagaatctctaattgcgtggccgactatagcgtgctgtacaatagcgcctccttctctacctttaagtgctatggcgtgagccccaccaagctgaacgatctgtgcttcacaaacgtgtacgccgactcctttgtgatccggggcgatgaagtgagacagatcgcaccaggacagaccggaaagatcgcagactacaactataagctgcctgacgatttcacaggctgcgtgatcgcctggaatagcaacaatctggattccaaagtgggcggcaactacaattatctgtacaggctgttccgcaagtccaacctgaagccatttgagcgggacatctccaccgagatctaccaggccggctctacaccctgcaacggcgtggagggcttcaattgttattttcccctgcagtcttacggcttccagcctacaaatggcgtgggctatcagccataccgggtggtggtgctgtcttttgagctgctgggagcaccagcaaccgtgtgcggccccaagaagagcacacatcatcaccaccaccaccaccactga

SEQ ID NO: 5812 - DNA, 735 bp, Artificial Sequence
  Description of Artificial Sequence: Synthetic polynucleotide
atgggcatcctgccaagcccaggaatgcccgccctgctgtctctggtgagcctgctgtccgtgctgctgatgggatgcgtggcagagacaggcacaaggttccctaacatcaccaatctgtgcccattcggcgaggtgtttaacgccacacgctttgcctccgtgtatagctggaaccggaagagaatctctaattgcgtggccgactatagcgtgctgtacaatagcgcctccttctctacctttaagtgctatggcgtgagccccaccaagctgaacgatctgtgcttcacaaacgtgtacgccgactcctttgtgatccggggcgatgaagtgagacagatcgcaccaggacagaccggaaagatcgcagactacaactataagctgcctgacgatttcacaggctgcgtgatcgcctggaatagcaacaatctggattccaaagtgggcggcaactacaattatctgtacaggctgttccgcaagtccaacctgaagccatttgagcgggacatctccaccgagatctaccaggccggctctacaccctgcaacggcgtggagggcttcaattgttattttcccctgcagtcttacggcttccagcctacaaatggcgtgggctatcagccataccgggtggtggtgctgtcttttgagctgctgcacgcaccagcaaccgtgtgcggccccaagaagagcacacatcatcaccaccaccaccaccactga

SEQ ID NO: 5813 - DNA, 735 bp, Artificial Sequence
  Description of Artificial Sequence: Synthetic polynucleotide
atgggcatcctgccaagcccaggaatgcccgccctgctgtctctggtgagcctgctgtccgtgctgctgatgggatgcgtggcagagacaggcacaaggttccctaacatcaccaatctgtgcccattcggcgaggtgtttaacgccacacgctttgcctccgtgtatgcctggaaccggaagagaatctctaattgcgtggccgactatagcgtgctgtacaatagcgcctccttctctacctttaagtgctatggcgtgagccccaccaagctgaacgatctgtgcttcacaaacgtgtacgccgacgtatttgtgatccggggcgatgaagtgagacagatcgcaccaggacagaccggaaagatcgcagactacaactataagctgcctgacgatttcacaggctgcgtgatcgcctggaatagcaacaatctggattccaaagtgggcggcaactacaattatctgtacaggctgttccgcaagtccaacctgaagccatttgagcgggacatctccaccgagatctaccaggccggctctacaccctgcaacggcgtggagggcttcaattgttattttcccctgcagtcttacggcttccagcctacaaatggcgtgggctatcagccataccgggtggtggtgctgtcttttgagctgctgcacgcaccagcaaccgtgtgcggccccaagaagagcacacatcatcaccaccaccaccaccactga

SEQ ID NO: 5814 - DNA, 735 bp, Artificial Sequence
  Description of Artificial Sequence: Synthetic polynucleotide
atgggcatcctgccaagcccaggaatgcccgccctgctgtctctggtgagcctgctgtccgtgctgctgatgggatgcgtggcagagacaggcacaaggttcactaacatcaccaatctgtgcccattcggcgaggtgtttaacgccacacgctttgcctccgtgtatgcctggaaccggaagagaatctctaattgcgtggccgactatagcgtgctgtacaatagcgcctccttctctacctttaagtgctatggcgtgagccccaccaagctgaacgatctgtgcttcacaaacgtgtacgccgactcctttgtgatccggggcgatgaagtgagacagatcgcaccaggacagaccggaaagatcgcagactacaactataagctgcctgacgatttcacaggctgcgtgatcgcctggaatagcaacaatctggattccaaagtgggcggcaactacaattatctgtacaggctgttccgcaagtccaacctgaagccatttgagcgggacatctccaccgagatctaccaggccggctctacaccctgcaacggcgtggagggcttcaattgttattttcccctgcagtcttacggcttccagcctacaaatggcgtgggctatcagccataccgggtggtggtgctgtcttttgagctgctgcacgcaccagcaaccgtgtgcggccccaagaagagcacacatcatcaccaccaccaccaccactga

SEQ ID NO: 5815 - DNA, 735 bp, Artificial Sequence
  Description of Artificial Sequence: Synthetic polynucleotide
atgggcatcctgccaagcccaggaatgcccgccctgctgtctctggtgagcctgctgtccgtgctgctgatgggatgcgtggcagagacaggcacaaggttccctaacatcaccaatctgtgcccattcggcgaggtgtttaacgccacacgctttgcctccgtgtatgcctggaaccggaagagaatctctaattgcgtggccgactatagcgtgctgtacaatagcgcctccttctctacctttaagtgctatggcgtgagcatgaccaagctgaacgatctgtgcttcacaaacgtgtacgccgactcctttgtgatccggggcgatgaagtgagacagatcgcaccaggacagaccggaaagatcgcagactacaactataagctgcctgacgatttcacaggctgcgtgatcgcctggaatagcaacaatctggattccaaagtgggcggcaactacaattatctgtacaggctgttccgcaagtccaacctgaagccatttgagcgggacatctccaccgagatctaccaggccggctctacaccctgcaacggcgtggagggcttcaattgttattttcccctgcagtcttacggcttccagcctacaaatggcgtgggctatcagccataccgggtggtggtgctgtcttttgagctgctgcacgcaccagcaaccgtgtgcggccccaagaagagcacacatcatcaccaccaccaccaccactga

SEQ ID NO: 5816 - DNA, 735 bp, Artificial Sequence
  Description of Artificial Sequence: Synthetic polynucleotide
atgggcatcctgccaagcccaggaatgcccgccctgctgtctctggtgagcctgctgtccgtgctgctgatgggatgcgtggcagagacaggcacaaggttccctaacatcaccaatctgtgcccattcggcgaggtgtttaacgccacacgctttgcctccgtgtatgcctggaaccggaagagaatctctaattgcgtggccgactatagcgtgctgtacaatagcgcctccttctctacctttaagtgctatggcgtgagccccaccaagctgaacgatctgtgcttcacaaacgtgtacgccgactcctttgtgatccggggcgatgaagtgagacagatcgcaccaggacagaccggaaagatcgcagactacaactataagctgcctgacgatttcacaggctgcgtgatcgcctggaatagcaacaatctggattccaaagtgggcggcaactacaattatctgtacaggctgttccgcaagtccaacctgaagccatttgagcgggacatctccaccggtatctaccaggccggctctacaccctgcaacggcgtggagggcttcaattgttattttcccctgcagtcttacggcttccagcctacaaatggcgtgggctatcagccataccgggtggtggtgctgtcttttgagctgctgcacgcaccagcaaccgtgtgcggccccaagaagagcacacatcatcaccaccaccaccaccactga

SEQ ID NO: 5817 - DNA, 735 bp, Artificial Sequence
  Description of Artificial Sequence: Synthetic polynucleotide
atgggcatcctgccaagcccaggaatgcccgccctgctgtctctggtgagcctgctgtccgtgctgctgatgggatgcgtggcagagacaggcacaaggttccctaacatcaccaatctgtgcccattcggcgaggtgtttaacgccacacgctttgcctccgtgtatgcctggaaccggaagagaatctctaattgcgtggccgactatagcattctgtacaatagcgcctccttctctacctttaagtgctatggcgtgagccccaccaagctgaacgatctgtgcttcacaaacgtgtacgccgactcctttgtgatccggggcgatgaagtgagacagatcgcaccaggacagaccggaaagatcgcagactacaactataagctgcctgacgatttcacaggctgcgtgatcgcctggaatagcaacaatctggattccaaagtgggcggcaactacaattatctgtacaggctgttccgcaagtccaacctgaagccatttgagcgggacatctccaccgagatctaccaggccggctctacaccctgcaacggcgtggagggcttcaattgttattttcccctgcagtcttacggcttccagcctacaaatggcgtgggctatcagccataccgggtggtggtgctgtcttttgagctgctgcacgcaccagcaaccgtgtgcggccccaagaagagcacacatcatcaccaccaccaccaccactga

SEQ ID NO: 5818 - DNA, 735 bp, Artificial Sequence
  Description of Artificial Sequence: Synthetic polynucleotide
atgggcatcctgccaagcccaggaatgcccgccctgctgtctctggtgagcctgctgtccgtgctgctgatgggatgcgtggcagagacaggcacaaggttccctaacatcaccaatctgtgcccattcggcgaggtgtttaacgccacacgctttgcctccgtgtatgcctggaaccggaagagaatctctaattgcgtggccgactatagcgtgctgtacaatagcgcctccttctctacctttaagtgctatggcgtgagccccaccaagctgaacgatctgtgcttcacaaacgtgtacgccgactcctttgtgatccggggcgatgaagtgagagagatcgcaccaggacagaccggaaagatcgcagactacaactataagctgcctgacgatttcacaggctgcgtgatcgcctggaatagcaacaatctggattccaaagtgggcggcaactacaattatctgtacaggctgttccgcaagtccaacctgaagccatttgagcgggacatctccaccgagatctaccaggccggctctacaccctgcaacggcgtggagggcttcaattgttattttcccctgcagtcttacggcttccagcctacaaatggcgtgggctatcagccataccgggtggtggtgctgtcttttgagctgctgcacgcaccagcaaccgtgtgcggccccaagaagagcacacatcatcaccaccaccaccaccactga

SEQ ID NO: 5819 - DNA, 735 bp, Artificial Sequence
  Description of Artificial Sequence: Synthetic polynucleotide
atgggcatcctgccaagcccaggaatgcccgccctgctgtctctggtgagcctgctgtccgtgctgctgatgggatgcgtggcagagacaggcacaaggttccctaacatcaccaatctgtgcccattcggcgaggtgtttaacgccacacgctttgcctccgtgtatgcctggaaccggaagagaatctctaattgcgtggccgactatagcgtgctgtacaatagcgcctccttctctacctttaagtgctatggcgtgagccccaccaagctgaacgatctgtgcttcacaaacgtgtacgccgactcctttgtgatccggggcgatgaagtgagacagatcgcaccaggacagaccggaaagatcgcagactacaactataagctgcctgacgatttcacaggctgcgtgatcgcctggaatagcaacaatctggattccaaagtgggcggcaactacaattatctgtacaggctgttccgcaagtccaacctgaatccatttgagcgggacatctccaccgagatctaccaggccggctctacaccctgcaacggcgtggagggcttcaattgttattttcccctgcagtcttacggcttccagcctacaaatggcgtgggctatcagccataccgggtggtggtgctgtcttttgagctgctgcacgcaccagcaaccgtgtgcggccccaagaagagcacacatcatcaccaccaccaccaccactga

SEQ ID NO: 5820 - DNA, 735 bp, Artificial Sequence
  Description of Artificial Sequence: Synthetic polynucleotide
atgggcatcctgccaagcccaggaatgcccgccctgctgtctctggtgagcctgctgtccgtgctgctgatgggatgcgtggcagagacaggcacaaggttccctaacatcaccaatctgtgcccattcggcgaggtgtttaacgccacacgctttgcctccgtgtatgattggaaccggaagagaatctctaattgcgtggccgactatagcgtgctgtacaatagcgcctccttctctacctttaagtgctatggcgtgagccccaccaagctgaacgatctgtgcttcacaaacgtgtacgccgactcctttgtgatccggggcgatgaagtgagacagatcgcaccaggacagaccggaaagatcgcagactacaactataagctgcctgacgatttcacaggctgcgtgatcgcctggaatagcaacaatctggattccaaagtgggcggcaactacaattatctgtacaggctgttccgcaagtccaacctgaagccatttgagcgggacatctccaccgagatctaccaggccggctctacaccctgcaacggcgtggagggcttcaattgttattttcccctgcagtcttacggcttccagcctacaaatggcgtgggctatcagccataccgggtggtggtgctgtcttttgagctgctgcacgcaccagcaaccgtgtgcggccccaagaagagcacacatcatcaccaccaccaccaccactga

SEQ ID NO: 5821 - DNA, 735 bp, Artificial Sequence
  Description of Artificial Sequence: Synthetic polynucleotide
atgggcatcctgccaagcccaggaatgcccgccctgctgtctctggtgagcctgctgtccgtgctgctgatgggatgcgtggcagagacaggcacaaggttccctaacatcaccaatctgtgcccattcggcgaggtgtttaacgccacacgctttgcctccgtgtatgcctggaaccggaagagaatctctaattgcgtggccgactatagcgtgctgtacaatagcgcctccttctctacctttaagtgctatggcgtgagccccaccaagctgaacgatctgtgcttcacaaacgtgtacgccgactcctttgtgatccggggcgatgaagtgagacagatcgcaccaggacagaccggaaagatcgcagactacaactataagctgcctgacgatttcacaggctgcgtgatcgcctggaatagcaacaatctggattccaaagtgggcggcaactacaattatctgtacaggctgttccgcaagtccaacctgaagccatttgagcgggacatctccaccgagggataccaggccggctctacaccctgcaacggcgtggagggcttcaattgttattttcccctgcagtcttacggcttccagcctacaaatggcgtgggctatcagccataccgggtggtggtgctgtcttttgagctgctgcacgcaccagcaaccgtgtgcggccccaagaagagcacacatcatcaccaccaccaccaccactga

SEQ ID NO: 5822 - DNA, 735 bp, Artificial Sequence
  Description of Artificial Sequence: Synthetic polynucleotide
atgggcatcctgccaagcccaggaatgcccgccctgctgtctctggtgagcctgctgtccgtgctgctgatgggatgcgtggcagagacaggcacaaggttccctaacatcaccaatctgtgcccattcggcgaggtgtttaacgccacacgctttgcctccgtgtatgcctggaaccggaagagaatctctaattgcgtggccgactatagcgtgctgtacaatagcgcctccttctctacctttaagtgctatggcgtgagccccaccaagctgaacgatctgtgcttcacaaacgtgtacgccgactcctttgtgatccggggcgatgaagtgagacagatcgcaccaggacagaccggaaagatcgcagactacaactataagctgcctgacgatttcacaggctgcgtgatcgcctggaatagcaacaatctggattccaaagtgggcggcaactacaattatctgtacaggctgttccgcaagtccaacctgaagccatttgagcgggacatctccaccgagatctaccaggccggctctacaccctgcaacggcgtggagggcttcaattgttattttcccctgcagtcttacggcttccagcctacaaatggcgtgaattatcagccataccgggtggtggtgctgtcttttgagctgctgcacgcaccagcaaccgtgtgcggccccaagaagagcacacatcatcaccaccaccaccaccactga

SEQ ID NO: 5823 - DNA, 735 bp, Artificial Sequence
  Description of Artificial Sequence: Synthetic polynucleotide
atgggcatcctgccaagcccaggaatgcccgccctgctgtctctggtgagcctgctgtccgtgctgctgatgggatgcgtggcagagacaggcacaaggttccctaacatcaccaatctgtgcccattcggcgaggtgtttaacgccacacgctttgcctccgtgtatgcctggaaccggaagagaatctctaattgcgtggccgactatagcgtgctgtacaatagcgcctccttctctacctttaagtgctatggcgtgagccccaccaagctgaacgatctgtgcttcacaaacgtgtacgccgactcctttgtgatccggggcgatgaagtgagacagatcgcaccaggacagaccggaaagatcgcagactacaactataagctgcctgacgatttcacaggctgcgtgatcgcctggaatagcaacaatctggattccaaagtgggcggcaactacaattatctgtacaggctgttccgcaagtccaacctgaagccatttgagtttgacatctccaccgagatctaccaggccggctctacaccctgcaacggcgtggagggcttcaattgttattttcccctgcagtcttacggcttccagcctacaaatggcgtgggctatcagccataccgggtggtggtgctgtcttttgagctgctgcacgcaccagcaaccgtgtgcggccccaagaagagcacacatcatcaccaccaccaccaccactga

SEQ ID NO: 5824 - DNA, 735 bp, Artificial Sequence
  Description of Artificial Sequence: Synthetic polynucleotide
atgggcatcctgccaagcccaggaatgcccgccctgctgtctctggtgagcctgctgtccgtgctgctgatgggatgcgtggcagagacaggcacaaggttccctaacatcaccaatctgtgcccattcggcgaggtgtttaacgccacacgctttgcctccgtgtatgcctggaaccggaagagaatctctaattgcgtggccgactatagcgtgctgtacaatagcgcctccttctctacctttaagtgctatggcgtgagccccaccaagctgaacgatctgtgcttcacaaacgtgtacgccgaccagtttgtgatccggggcgatgaagtgagacagatcgcaccaggacagaccggaaagatcgcagactacaactataagctgcctgacgatttcacaggctgcgtgatcgcctggaatagcaacaatctggattccaaagtgggcggcaactacaattatctgtacaggctgttccgcaagtccaacctgaagccatttgagcgggacatctccaccgagatctaccaggccggctctacaccctgcaacggcgtggagggcttcaattgttattttcccctgcagtcttacggcttccagcctacaaatggcgtgggctatcagccataccgggtggtggtgctgtcttttgagctgctgcacgcaccagcaaccgtgtgcggccccaagaagagcacacatcatcaccaccaccaccaccactga

SEQ ID NO: 5825 - DNA, 735 bp, Artificial Sequence
  Description of Artificial Sequence: Synthetic polynucleotide
atgggcatcctgccaagcccaggaatgcccgccctgctgtctctggtgagcctgctgtccgtgctgctgatgggatgcgtggcagagacaggcacaaggttccctaacatcaccaatctgtgcccattcggcgaggtgtttaacgccacacgctttgcctccgtgtatgcctggaaccggaagagaatctctaattgcgtggccgactatagcgtgctgtacaatagcgccactttctctacctttaagtgctatggcgtgagccccaccaagctgaacgatctgtgcttcacaaacgtgtacgccgactcctttgtgatccggggcgatgaagtgagacagatcgcaccaggacagaccggaaagatcgcagactacaactataagctgcctgacgatttcacaggctgcgtgatcgcctggaatagcaacaatctggattccaaagtgggcggcaactacaattatctgtacaggctgttccgcaagtccaacctgaagccatttgagcgggacatctccaccgagatctaccaggccggctctacaccctgcaacggcgtggagggcttcaattgttattttcccctgcagtcttacggcttccagcctacaaatggcgtgggctatcagccataccgggtggtggtgctgtcttttgagctgctgcacgcaccagcaaccgtgtgcggccccaagaagagcacacatcatcaccaccaccaccaccactga

SEQ ID NO: 5826 - DNA, 735 bp, Artificial Sequence
  Description of Artificial Sequence: Synthetic polynucleotide
atgggcatcctgccaagcccaggaatgcccgccctgctgtctctggtgagcctgctgtccgtgctgctgatgggatgcgtggcagagacaggcacaaggttccctaacatcaccaatctgtgcccattcggcgaggtgtttaacgccacacgctttgcctccgtgtatgcctggaaccggaagagaatctctaattgcgtggccgactatagcgtgctgtacaatagcgcctccttctctacctttaagtgctatggcgtgagccccaccaagctgaacgatctgtgcttcacaaacgtgtacgccgactcctttgtgatccggggcgatgaagtgagacagatcgcaccaggacagaccggaaagatcgcagactacaactataagctgcctgacgatttcacaggctgcgtgatcgcctggaatagcgagaatctggattccaaagtgggcggcaactacaattatctgtacaggctgttccgcaagtccaacctgaagccatttgagcgggacatctccaccgagatctaccaggccggctctacaccctgcaacggcgtggagggcttcaattgttattttcccctgcagtcttacggcttccagcctacaaatggcgtgggctatcagccataccgggtggtggtgctgtcttttgagctgctgcacgcaccagcaaccgtgtgcggccccaagaagagcacacatcatcaccaccaccaccaccactga

SEQ ID NO: 5827 - DNA, 735 bp, Artificial Sequence
  Description of Artificial Sequence: Synthetic polynucleotide
atgggcatcctgccaagcccaggaatgcccgccctgctgtctctggtgagcctgctgtccgtgctgctgatgggatgcgtggcagagacaggcacaaggttccctaacatcaccaatctgtgcccattcggcgaggtgtttaacgccacacgctttgcctccgtgtatgcctggaaccggaagagaatctctaattgcgtggccgactatagcgtgctgtacaatagcgcctccttctctacctttaagtgctatggcgtgagccccaccaagctgaacgatctgtgcttcacaaacgtgtacgccgactcctttgtgatccggggcgatgaagtgagacagatcgcaccaggacagaccggaaagatcgcagactacaactataagctgcctgacgatttcacaggctgcgtgatcgcctggaatagcaacaatctggattccaaaatgggcggcaactacaattatctgtacaggctgttccgcaagtccaacctgaagccatttgagcgggacatctccaccgagatctaccaggccggctctacaccctgcaacggcgtggagggcttcaattgttattttcccctgcagtcttacggcttccagcctacaaatggcgtgggctatcagccataccgggtggtggtgctgtcttttgagctgctgcacgcaccagcaaccgtgtgcggccccaagaagagcacacatcatcaccaccaccaccaccactga

SEQ ID NO: 5828 - DNA, 735 bp, Artificial Sequence
  Description of Artificial Sequence: Synthetic polynucleotide
atgggcatcctgccaagcccaggaatgcccgccctgctgtctctggtgagcctgctgtccgtgctgctgatgggatgcgtggcagagacaggcacaaggttccctaacatcaccaatctgtgcccattcggcgaggtgtttaacgccacacgctttgcctccgtgtatgcctggaaccggaagagaatctctaattgcgtggccgactatagcacgctgtacaatagcgcctccttctctacctttaagtgctatggcgtgagccccaccaagctgaacgatctgtgcttcacaaacgtgtacgccgactcctttgtgatccggggcgatgaagtgagacagatcgcaccaggacagaccggaaagatcgcagactacaactataagctgcctgacgatttcacaggctgcgtgatcgcctggaatagcaacaatctggattccaaagtgggcggcaactacaattatctgtacaggctgttccgcaagtccaacctgaagccatttgagcgggacatctccaccgagatctaccaggccggctctacaccctgcaacggcgtggagggcttcaattgttattttcccctgcagtcttacggcttccagcctacaaatggcgtgggctatcagccataccgggtggtggtgctgtcttttgagctgctgcacgcaccagcaaccgtgtgcggccccaagaagagcacacatcatcaccaccaccaccaccactga

SEQ ID NO: 5829 - DNA, 735 bp, Artificial Sequence
  Description of Artificial Sequence: Synthetic polynucleotide
atgggcatcctgccaagcccaggaatgcccgccctgctgtctctggtgagcctgctgtccgtgctgctgatgggatgcgtggcagagacaggcacaaggttccctaacatcaccaatctgtgcccattcggcgaggtgtttaacgccacacgctttgcctccgtgtatgcctggaaccggaagagaatctctaattgcgtggccgactatagcgtgctgtacaatagcgcctccttctctacctttaagtgctatggcgtgagccccaccaagctgaacgatctgtgcttcacaaacgtgtacgccgactcctttgtgatccggggcgatgaagtgagacagatcgcaccaggacagaccggaaagatcgcagactacaactatcaactgcctgacgatttcacaggctgcgtgatcgcctggaatagcaacaatctggattccaaagtgggcggcaactacaattatctgtacaggctgttccgcaagtccaacctgaagccatttgagcgggacatctccaccgagatctaccaggccggctctacaccctgcaacggcgtggagggcttcaattgttattttcccctgcagtcttacggcttccagcctacaaatggcgtgggctatcagccataccgggtggtggtgctgtcttttgagctgctgcacgcaccagcaaccgtgtgcggccccaagaagagcacacatcatcaccaccaccaccaccactga

SEQ ID NO: 5830 - DNA, 735 bp, Artificial Sequence
  Description of Artificial Sequence: Synthetic polynucleotide
atgggcatcctgccaagcccaggaatgcccgccctgctgtctctggtgagcctgctgtccgtgctgctgatgggatgcgtggcagagacaggcacaaggttccctaacatcaccaatctgtgcccattcggcgaggtgtttaacgccacacgctttgcctccgtgtatgcctggaaccggaagagaatctctaattgcgtggccgactatagcgtgctgtacaatagcgcctccttctctacctttaagtgctatggcgtgagccccaccaagctgaacgatctgtgcttcacaaacgtgtacgccgactcctttgtgatccggggcgatgaagtgagacagatcgcaccaggacagaccggaaagatcgcagactacaactataagctgcctgacgatttcacaggctgcgtgatcgcctggaatagcaacaatctggattccaaagtgggcggcaactacaattatctgtacaggctgttccgcaagtccaacctgaagccatttgagcgggacatcgataccgagatctaccaggccggctctacaccctgcaacggcgtggagggcttcaattgttattttcccctgcagtcttacggcttccagcctacaaatggcgtgggctatcagccataccgggtggtggtgctgtcttttgagctgctgcacgcaccagcaaccgtgtgcggccccaagaagagcacacatcatcaccaccaccaccaccactga

SEQ ID NO: 5831 - DNA, 735 bp, Artificial Sequence
  Description of Artificial Sequence: Synthetic polynucleotide
atgggcatcctgccaagcccaggaatgcccgccctgctgtctctggtgagcctgctgtccgtgctgctgatgggatgcgtggcagagacaggcacaaggttccctaacatcaccaatctgtgcccattcggcgaggtgtttaacgccacacgctttgcctccgtgtatgcctggaaccggaagagaatctctaattgcgtggccgactatagcgtgctgtacaatagcgcctccttctctacctttaagtgctatggcgtgagccccaccaagctgaacgatctgtgcttcacaaacgtgtacgccgactcctttgtgatccggggcgatgaagtgagacagatcgcaccaggacagaccggaaagatcgcagactacaactataagctgcctgacgatttcacaggctgcgtgatcgcctggaatagcaacaatctggattgtaaagtgggcggcaactacaattatctgtacaggctgttccgcaagtccaacctgaagccatttgagcgggacatctccaccgagatctaccaggccggctctacaccctgcaacggcgtggagggcttcaattgttattttcccctgcagtcttacggcttccagcctacaaatggcgtgggctatcagccataccgggtggtggtgctgtcttttgagctgctgcacgcaccagcaaccgtgtgcggccccaagaagagcacacatcatcaccaccaccaccaccactga

SEQ ID NO: 5832 - DNA, 735 bp, Artificial Sequence
  Description of Artificial Sequence: Synthetic polynucleotide
atgggcatcctgccaagcccaggaatgcccgccctgctgtctctggtgagcctgctgtccgtgctgctgatgggatgcgtggcagagacaggcacaaggttccctaacatcaccaatctgtgcccattcggcgaggtgtttaacgccacacgctttgcctccgtgtatgcctggaaccggaagagaatctctaattgcgtggccgactatagcgtgctgtacaatagcgcctccttctctacctttaagtgctatggcgtgagccccaccaagctgaacgatctgtgcttcacaaacgtgtacgccgactcctttgtgatccggggcgatgaagtgagacagatcgcaccaggacagaccggaaagatcgcagactacaactataagctgcctgacgatttcacaggctgcgtgatcgcctggaatagcaacaatctggattccaaagtgggcggcaactacaattatctgtacaggctgttccgcaagtccaacctgaagccatttgagcgggacatctccaccgtaatctaccaggccggctctacaccctgcaacggcgtggagggcttcaattgttattttcccctgcagtcttacggcttccagcctacaaatggcgtgggctatcagccataccgggtggtggtgctgtcttttgagctgctgcacgcaccagcaaccgtgtgcggccccaagaagagcacacatcatcaccaccaccaccaccactga

SEQ ID NO: 5833 - DNA, 735 bp, Artificial Sequence
  Description of Artificial Sequence: Synthetic polynucleotide
atgggcatcctgccaagcccaggaatgcccgccctgctgtctctggtgagcctgctgtccgtgctgctgatgggatgcgtggcagagacaggcacaaggttccctaacatcaccaatctgtgcccattcggcgaggtgtttaacgccacacgctttgcctccgtgtatgcctggaaccggaagagaatctctaattgcgtggccgactatagcgtgctgtacaatagcgcctccttctctacctttaagtgctatggcgtgagccccaccaagctgaacgatctgtgcttcacaaacgtgtacgccgactcctttgtgatccggggcgatgaagtgagacagatcgcaccaggacagaccggaaagatcgcagactacaactataagctgcctgacgatttcacaggctgcgtgatcgcctggaatagcaacaatctggattccaaagtgggcggcaactacaattatctgtacaggctgttccgcaagtccaactttaagccatttgagcgggacatctccaccgagatctaccaggccggctctacaccctgcaacggcgtggagggcttcaattgttattttcccctgcagtcttacggcttccagcctacaaatggcgtgggctatcagccataccgggtggtggtgctgtcttttgagctgctgcacgcaccagcaaccgtgtgcggccccaagaagagcacacatcatcaccaccaccaccaccactga

SEQ ID NO: 5834 - DNA, 735 bp, Artificial Sequence
  Description of Artificial Sequence: Synthetic polynucleotide
atgggcatcctgccaagcccaggaatgcccgccctgctgtctctggtgagcctgctgtccgtgctgctgatgggatgcgtggcagagacaggcacaaggttccctaacatcaccaatctgtgcccattcggcgaggtgtttaacgccacacgctttgcctccgtgtatgcctggaaccggaagagaatctctaattgcgtggccgactatagcgtgctgtacaatagcgcctccttctctacctttaagtgctatggcgtgagccccaccaagctgaacgatctgtgcttcacaaacgtgtacgccgactcctttgtgatccggggcgatgaagtgagacagatcgcaccaggacagaccggaaagatcgcagactacaactataagctgcctgacgatttcacaggctgcgtgatcgcctggaatagcaacaatctggattccaaagtgggcggcaactacaattatctgtacaggctgttccgcaagtccaacctgaagccatttgagcgggacatctccaccgagatctaccaggccggctctacaccctgcaacggcgtggagggcttcaattggtattttcccctgcagtcttacggcttccagcctacaaatggcgtgggctatcagccataccgggtggtggtgctgtcttttgagctgctgcacgcaccagcaaccgtgtgcggccccaagaagagcacacatcatcaccaccaccaccaccactga

SEQ ID NO: 5835 - DNA, 735 bp, Artificial Sequence
  Description of Artificial Sequence: Synthetic polynucleotide
atgggcatcctgccaagcccaggaatgcccgccctgctgtctctggtgagcctgctgtccgtgctgctgatgggatgcgtggcagagacaggcacaaggttccctaacatcaccaatctgtgcccattcggcgaggtgtttaacgccacacgctttgcctccgtgtatgcctggaaccggaagagaatctctaattgcgtggccgactatagcgtgctgtacaatagcgcctccttctctacctttaagtgctatggcgtgagccccaccaagctgaacgatctgtgcttcacaaacgtgtacgccgactcctttgtgatccggggcgatgaagtgagacagatcgcaccaggacagaccggaaagatcgcagactacaactataagctgcctgacgatttcacaggctgcgtgatcgcctggaatagcaacaatctggattccaaagtgggcggcaactacaattatctgtacaggctgcaccgcaagtccaacctgaagccatttgagcgggacatctccaccgagatctaccaggccggctctacaccctgcaacggcgtggagggcttcaattgttattttcccctgcagtcttacggcttccagcctacaaatggcgtgggctatcagccataccgggtggtggtgctgtcttttgagctgctgcacgcaccagcaaccgtgtgcggccccaagaagagcacacatcatcaccaccaccaccaccactga

SEQ ID NO: 5836 - DNA, 735 bp, Artificial Sequence
  Description of Artificial Sequence: Synthetic polynucleotide
atgggcatcctgccaagcccaggaatgcccgccctgctgtctctggtgagcctgctgtccgtgctgctgatgggatgcgtggcagagacaggcacaaggttccctaacatcaccaatctgtgcccattcggcgaggtgtttaacgccacacgctttgcctccgtgtatgcctggaaccggaagagaatctctaattgcgtggccgactatagcgtgctgtacaatagcgcctccttctctacctttaagtgctatggcgtgagccccaccaagctgaacgatctgtgcttcacaaacgtgtacgccgactcctttgtgatccggggcgatgaagtgagacagatcgcaccaggacagaccggaaagatcgcagactacaactataagctgcctgacgatttcacaggctgcgtgatcgcctggaatagcaacaatctggattccaaagtgggcggcaactacaattatctgtacaggctgttccgcaagtccaacctgaagccatttgagcgggacatctccaccgagatctaccaggccggctctacaccctgcaacggcgtggagggcttcaattgttattttcccctgcagtcttacggcttccagcctacaaatggcgtgatgtatcagccataccgggtggtggtgctgtcttttgagctgctgcacgcaccagcaaccgtgtgcggccccaagaagagcacacatcatcaccaccaccaccaccactga

SEQ ID NO: 5837 - DNA, 735 bp, Artificial Sequence
  Description of Artificial Sequence: Synthetic polynucleotide
atgggcatcctgccaagcccaggaatgcccgccctgctgtctctggtgagcctgctgtccgtgctgctgatgggatgcgtggcagagacaggcacaaggttccctaacatcaccaatctgtgcccattcggcgaggtgtttaacgccacacgctttgcctccgtgtatgcctggaaccggaagagaatctctaattgcgtggccgactatagcgtgctgtacaatagcgcctccttctctacctttaagtgctatggcgtgagccccaccaagctgaacgatctgtgcttcacaaacgtgtacgccgacaattttgtgatccggggcgatgaagtgagacagatcgcaccaggacagaccggaaagatcgcagactacaactataagctgcctgacgatttcacaggctgcgtgatcgcctggaatagcaacaatctggattccaaagtgggcggcaactacaattatctgtacaggctgttccgcaagtccaacctgaagccatttgagcgggacatctccaccgagatctaccaggccggctctacaccctgcaacggcgtggagggcttcaattgttattttcccctgcagtcttacggcttccagcctacaaatggcgtgggctatcagccataccgggtggtggtgctgtcttttgagctgctgcacgcaccagcaaccgtgtgcggccccaagaagagcacacatcatcaccaccaccaccaccactga

SEQ ID NO: 5838 - DNA, 735 bp, Artificial Sequence
  Description of Artificial Sequence: Synthetic polynucleotide
atgggcatcctgccaagcccaggaatgcccgccctgctgtctctggtgagcctgctgtccgtgctgctgatgggatgcgtggcagagacaggcacaaggttccctaacatcaccaatctgtgcccattcggcgaggtgtttaacgccacacgctttgcctccgtgtatgcctggaaccggaagagaatctctaattgcgtggccgactatagcgtgctgtacaatagcgcctccttctctacctttaagtgctatggcgtgagccccaccaagctgaacgatctgtgcttcacaaacgtgtacgccgactcctttgtgatccggggcgatgaagtgagacagatcgcaccaggacagaccggaaagatcgcagactacaactataagctgcctgacgatttcacaggctgcgtgatcgcctggaatagcaacaatctggattccaaagtgggcggcaactacaattatctgtacaggctgttccgcaagtccaacctgaagccatacgagcgggacatctccaccgagatctaccaggccggctctacaccctgcaacggcgtggagggcttcaattgttattttcccctgcagtcttacggcttccagcctacaaatggcgtgggctatcagccataccgggtggtggtgctgtcttttgagctgctgcacgcaccagcaaccgtgtgcggccccaagaagagcacacatcatcaccaccaccaccaccactga

SEQ ID NO: 5839 - DNA, 735 bp, Artificial Sequence
  Description of Artificial Sequence: Synthetic polynucleotide
atgggcatcctgccaagcccaggaatgcccgccctgctgtctctggtgagcctgctgtccgtgctgctgatgggatgcgtggcagagacaggcacaaggttccctaacatcaccaatctgtgcccattcggcgaggtgtttaacgccacacgctttgcctccgtgtatgcctggaaccggaagagaatctctaattgcgtggccgactatagcgtgctgtacaatagcgcctccttctctacctttaagtgctatggcgtgagccccaccaagctgaacgatctgtgcttcacaaacgtgtacgccgactcctttgtgatccggggcgatgaagtgagacagatcgcaccaggacagaccggaaagatcgcagactacaactataagctgcctgacgatttcacaggctgcgtgatcgcctggaatagcaacaatctggattccaaagtgggcggcaactacaattatctgtacaggctgttccgcaagtccaacctgaagccatttgagcgggacatctccaccgagatctaccaggccggctctacaccctgcaacggcgtggagggcttcaattgttattttcccctgcagtcttacggcttccagcctacaaatggcgtgggctatcagccataccgggtggtggtgctgtcttttgagctgctggctgcaccagcaaccgtgtgcggccccaagaagagcacacatcatcaccaccaccaccaccactga

SEQ ID NO: 5840 - DNA, 735 bp, Artificial Sequence
  Description of Artificial Sequence: Synthetic polynucleotide
atgggcatcctgccaagcccaggaatgcccgccctgctgtctctggtgagcctgctgtccgtgctgctgatgggatgcgtggcagagacaggcacaaggttccctaacatcaccaatctgtgcccattcggcgaggtgtttaacgccacacgctttgcctccgtgtatgcctggaaccggaagagaatctctaattgcgtggccgactatagcgtgctgtacaatagcgcctccttctctacctttaagtgctatggcgtgagccccaccaagctgaacgatctgtgcttcacaaacgtgtacgccgactcctttgtgatccggggcgatgaagtgagacagatcgcaccaggacagaccggaaagatcgcagactacaactataagctgcctgacgatttcacaggctgcgtgatcgcctggaatagcaacagtctggattccaaagtgggcggcaactacaattatctgtacaggctgttccgcaagtccaacctgaagccatttgagcgggacatctccaccgagatctaccaggccggctctacaccctgcaacggcgtggagggcttcaattgttattttcccctgcagtcttacggcttccagcctacaaatggcgtgggctatcagccataccgggtggtggtgctgtcttttgagctgctgcacgcaccagcaaccgtgtgcggccccaagaagagcacacatcatcaccaccaccaccaccactga

SEQ ID NO: 5841 - DNA, 735 bp, Artificial Sequence
  Description of Artificial Sequence: Synthetic polynucleotide
atgggcatcctgccaagcccaggaatgcccgccctgctgtctctggtgagcctgctgtccgtgctgctgatgggatgcgtggcagagacaggcacaaggttccctaacatcaccaatctgtgcccattcggcgaggtgtttaacgccacacgctttgcctccgtgtatgcctggaaccggaagagaatctctaattgcgtggccgactatagcgtgctgtacaatagcgcctccttctctacctttaagtgctatggcgtgagccccaccaagctgaacgatctgtgcttcacaaacgtgtacgccgactcctttgtgatccggggcgatgaagtgagacagatcgcaccaggacagaccggaaagatcgcagactacaactataagctgcctgacgatttcacaggctgcgtgatcgcctggaatagcaacaatctggattccaaatgtggcggcaactacaattatctgtacaggctgttccgcaagtccaacctgaagccatttgagcgggacatctccaccgagatctaccaggccggctctacaccctgcaacggcgtggagggcttcaattgttattttcccctgcagtcttacggcttccagcctacaaatggcgtgggctatcagccataccgggtggtggtgctgtcttttgagctgctgcacgcaccagcaaccgtgtgcggccccaagaagagcacacatcatcaccaccaccaccaccactga

SEQ ID NO: 5842 - DNA, 735 bp, Artificial Sequence
  Description of Artificial Sequence: Synthetic polynucleotide
atgggcatcctgccaagcccaggaatgcccgccctgctgtctctggtgagcctgctgtccgtgctgctgatgggatgcgtggcagagacaggcacaaggttccctaacatcaccaatctgtgcccattcggcgaggtgtttaacgccacacgctttgcctccgtgtatgcctggaaccggaagagaatctctaattgcgtggccgactatagcgtgctgtacaatagcgcctccttctctacctttaagtgctatggcgtgagccccaccaagctgaacgatctgtgcttcacaaacgtgtacgccgactcctttgtgatccggggcgatgaagtgagacagatcgcaccaggacagaccggaaagatcgcagactacaactataagctgcctgacgatttcacaggctgcgtgatcgcctggaatagcaacaatctggattccaaagtgggcggcaactacaattatctgtacaggctgttccgcaagtccaacctgaagccatttgagcgggacatctccaccgagatctaccaggccggctctacaccctgcaacggcgtggagggcttcaattgttattttcccctgcagtcttacggcttccagcctacaaatggcgtgggctatcagccataccgggtggtggtgctgtcttttgagctggatcacgcaccagcaaccgtgtgcggccccaagaagagcacacatcatcaccaccaccaccaccactga

SEQ ID NO: 5843 - DNA, 735 bp, Artificial Sequence
  Description of Artificial Sequence: Synthetic polynucleotide
atgggcatcctgccaagcccaggaatgcccgccctgctgtctctggtgagcctgctgtccgtgctgctgatgggatgcgtggcagagacaggcacaaggttccctaacatcaccaatctgtgcccattcggcgaggtgtttaacgccacacgctttgcctccgtgtatgcctggaaccggaagagaatctctaattgcgtggccgactatagcgtgctgtacaatagcgcctccttctctacctttaagtgctatggcgtgagccccaccaagctgaacgatctgtgcttcacaaacgtgtacgccgactcctttgtgatccggggcgatgaagtgagacagatcgcaccaggacagaccggaaagatcgcagactacaactataagctgcctgacgatttcacaggctgcgtgatcgcctggaatagccaaaatctggattccaaagtgggcggcaactacaattatctgtacaggctgttccgcaagtccaacctgaagccatttgagcgggacatctccaccgagatctaccaggccggctctacaccctgcaacggcgtggagggcttcaattgttattttcccctgcagtcttacggcttccagcctacaaatggcgtgggctatcagccataccgggtggtggtgctgtcttttgagctgctgcacgcaccagcaaccgtgtgcggccccaagaagagcacacatcatcaccaccaccaccaccactga

SEQ ID NO: 5844 - DNA, 735 bp, Artificial Sequence
  Description of Artificial Sequence: Synthetic polynucleotide
atgggcatcctgccaagcccaggaatgcccgccctgctgtctctggtgagcctgctgtccgtgctgctgatgggatgcgtggcagagacaggcacaaggttccctaacatcaccaatctgtgcccattcggcgaggtgtttaacgccacacgctttgcctccgtgtatgcctggaaccggaagagaatctctaattgcgtggccgactatagcgtgctgtacaatagcgcctccttctctacctttaagtgctatggcgtgagccccaccaagctgaacgatctgtgcttcacaaacgtgtacgccgactcctttgtgatccggggcgatgaagtgagacagatcgcaccaggacagaccggaaagatcgcagactacaactataagctgcctgacgatttcacaggctgcgtgatcgcctggaatagcaacaatctggattccaaagtgggcggcaactacaattatctgtacaggctgttccgcaagtccaacctgaagccatttgagcgggacatctccaccgagatctaccaggccggctctacaccctgcaacggcgtggagggcttcaattgttattttcccctgcagtcttacggcttccagcctacaaatggcgtgggctatcagccataccgggtggtggtgctgtcttttgagctgctggaagcaccagcaaccgtgtgcggccccaagaagagcacacatcatcaccaccaccaccaccactga

SEQ ID NO: 5845 - DNA, 735 bp, Artificial Sequence
  Description of Artificial Sequence: Synthetic polynucleotide
atgggcatcctgccaagcccaggaatgcccgccctgctgtctctggtgagcctgctgtccgtgctgctgatgggatgcgtggcagagacaggcacaaggttccctaacatcaccaatctgtgcccattcggcgaggtgtttaacgccacacgctttgcctccgtgtatgcctggaaccggaagagaatctctaattgcgtggccgacttcagcgtgctgtacaatagcgcctccttctctacctttaagtgctatggcgtgagccccaccaagctgaacgatctgtgcttcacaaacgtgtacgccgactcctttgtgatccggggcgatgaagtgagacagatcgcaccaggacagaccggaaagatcgcagactacaactataagctgcctgacgatttcacaggctgcgtgatcgcctggaatagcaacaatctggattccaaagtgggcggcaactacaattatctgtacaggctgttccgcaagtccaacctgaagccatttgagcgggacatctccaccgagatctaccaggccggctctacaccctgcaacggcgtggagggcttcaattgttattttcccctgcagtcttacggcttccagcctacaaatggcgtgggctatcagccataccgggtggtggtgctgtcttttgagctgctgcacgcaccagcaaccgtgtgcggccccaagaagagcacacatcatcaccaccaccaccaccactga

SEQ ID NO: 5846 - DNA, 735 bp, Artificial Sequence
  Description of Artificial Sequence: Synthetic polynucleotide
atgggcatcctgccaagcccaggaatgcccgccctgctgtctctggtgagcctgctgtccgtgctgctgatgggatgcgtggcagagacaggcacaaggttccctaacatcaccaatctgtgcccattcggcgaggtgtttaacgccacacgctttgcctccgtgtatgcctggaaccggaagagattctctaattgcgtggccgactatagcgtgctgtacaatagcgcctccttctctacctttaagtgctatggcgtgagccccaccaagctgaacgatctgtgcttcacaaacgtgtacgccgactcctttgtgatccggggcgatgaagtgagacagatcgcaccaggacagaccggaaagatcgcagactacaactataagctgcctgacgatttcacaggctgcgtgatcgcctggaatagcaacaatctggattccaaagtgggcggcaactacaattatctgtacaggctgttccgcaagtccaacctgaagccatttgagcgggacatctccaccgagatctaccaggccggctctacaccctgcaacggcgtggagggcttcaattgttattttcccctgcagtcttacggcttccagcctacaaatggcgtgggctatcagccataccgggtggtggtgctgtcttttgagctgctgcacgcaccagcaaccgtgtgcggccccaagaagagcacacatcatcaccaccaccaccaccactga

SEQ ID NO: 5847 - DNA, 735 bp, Artificial Sequence
  Description of Artificial Sequence: Synthetic polynucleotide
atgggcatcctgccaagcccaggaatgcccgccctgctgtctctggtgagcctgctgtccgtgctgctgatgggatgcgtggcagagacaggcacaaggttccctaacatcaccaatctgtgcccattcggcgaggtgtttaacgccacacgctttgcctccgtgtatgcctggaaccggaagagaatctctaattgcgtggccgactatagcgtgctgtacaatagcgcctccttctctacctttaagtgctatggcgtgagccccaccaagctgaacgatctgtgcttcacaaacgtgtacgccgactcctttgtgatccggggcgatgaagtgagacagatcgcaccaggacagaccggaaagatcgcagactacaactataagctgcctgacgatttcacaggctgcgtgatcgcctggaatagcaacaatctggattccaaagtgggcggcaactacaattatctgtacaggctgttccgcaagtccaacctgaagccatttgagcgggacatctccaccgagatctaccaggccggctctacaccctgcaacggcgtggagggcttcaattgttattttcccctgcagtcttacggcttccagcctacaaatggcgtgggctatcagccataccgggtggtggtgctgtcttttgagctgaatcacgcaccagcaaccgtgtgcggccccaagaagagcacacatcatcaccaccaccaccaccactga

SEQ ID NO: 5848 - DNA, 735 bp, Artificial Sequence
  Description of Artificial Sequence: Synthetic polynucleotide
atgggcatcctgccaagcccaggaatgcccgccctgctgtctctggtgagcctgctgtccgtgctgctgatgggatgcgtggcagagacaggcacaaggttccctaacatcaccaatctgtgcccattcggcgaggtgtttaacgccacacgctttgggtccgtgtatgcctggaaccggaagagaatctctaattgcgtggccgactatagcgtgctgtacaatagcgcctccttctctacctttaagtgctatggcgtgagccccaccaagctgaacgatctgtgcttcacaaacgtgtacgccgactcctttgtgatccggggcgatgaagtgagacagatcgcaccaggacagaccggaaagatcgcagactacaactataagctgcctgacgatttcacaggctgcgtgatcgcctggaatagcaacaatctggattccaaagtgggcggcaactacaattatctgtacaggctgttccgcaagtccaacctgaagccatttgagcgggacatctccaccgagatctaccaggccggctctacaccctgcaacggcgtggagggcttcaattgttattttcccctgcagtcttacggcttccagcctacaaatggcgtgggctatcagccataccgggtggtggtgctgtcttttgagctgctgcacgcaccagcaaccgtgtgcggccccaagaagagcacacatcatcaccaccaccaccaccactga

SEQ ID NO: 5849 - DNA, 735 bp, Artificial Sequence
  Description of Artificial Sequence: Synthetic polynucleotide
atgggcatcctgccaagcccaggaatgcccgccctgctgtctctggtgagcctgctgtccgtgctgctgatgggatgcgtggcagagacaggcacaaggttccctaacatcaccaatctgtgcccattcggcgaggtgtttaacgccacacgctttgcctccgtgtatgcctggaaccggaagagaatctctaattgcgtggccgactatagccagctgtacaatagcgcctccttctctacctttaagtgctatggcgtgagccccaccaagctgaacgatctgtgcttcacaaacgtgtacgccgactcctttgtgatccggggcgatgaagtgagacagatcgcaccaggacagaccggaaagatcgcagactacaactataagctgcctgacgatttcacaggctgcgtgatcgcctggaatagcaacaatctggattccaaagtgggcggcaactacaattatctgtacaggctgttccgcaagtccaacctgaagccatttgagcgggacatctccaccgagatctaccaggccggctctacaccctgcaacggcgtggagggcttcaattgttattttcccctgcagtcttacggcttccagcctacaaatggcgtgggctatcagccataccgggtggtggtgctgtcttttgagctgctgcacgcaccagcaaccgtgtgcggccccaagaagagcacacatcatcaccaccaccaccaccactga

SEQ ID NO: 5850 - DNA, 735 bp, Artificial Sequence
  Description of Artificial Sequence: Synthetic polynucleotide
atgggcatcctgccaagcccaggaatgcccgccctgctgtctctggtgagcctgctgtccgtgctgctgatgggatgcgtggcagagacaggcacaaggttccctaacatcaccaatctgtgcccattcggcgaggtgtttaacgccacacgctttgcctccgtgtatgcctggaaccggaagagaatctctaattgcgtggccgactatagcgtgctgtacaatagcgcctccttctctacctttaagtgctatggcgtgagccccaccaagctgaacgatctgtgcttcacaaacgtgtacgccgactcctttgtgatccggggcgatgaagtgagacagatcgcaccaggacagaccggaaagatcgcagactacaactataagctgcctgacgatttcacaggctgcgtgatcgcctggaatagcgggaatctggattccaaagtgggcggcaactacaattatctgtacaggctgttccgcaagtccaacctgaagccatttgagcgggacatctccaccgagatctaccaggccggctctacaccctgcaacggcgtggagggcttcaattgttattttcccctgcagtcttacggcttccagcctacaaatggcgtgggctatcagccataccgggtggtggtgctgtcttttgagctgctgcacgcaccagcaaccgtgtgcggccccaagaagagcacacatcatcaccaccaccaccaccactga

SEQ ID NO: 5851 - DNA, 735 bp, Artificial Sequence
  Description of Artificial Sequence: Synthetic polynucleotide
atgggcatcctgccaagcccaggaatgcccgccctgctgtctctggtgagcctgctgtccgtgctgctgatgggatgcgtggcagagacaggcacaaggttccctaacatcaccaatctgtgcccattcggcgaggtgtttaacgccacacgctttgcctccgtgtatgcctggaaccggaagagaatctctaattgctgggccgactatagcgtgctgtacaatagcgcctccttctctacctttaagtgctatggcgtgagccccaccaagctgaacgatctgtgcttcacaaacgtgtacgccgactcctttgtgatccggggcgatgaagtgagacagatcgcaccaggacagaccggaaagatcgcagactacaactataagctgcctgacgatttcacaggctgcgtgatcgcctggaatagcaacaatctggattccaaagtgggcggcaactacaattatctgtacaggctgttccgcaagtccaacctgaagccatttgagcgggacatctccaccgagatctaccaggccggctctacaccctgcaacggcgtggagggcttcaattgttattttcccctgcagtcttacggcttccagcctacaaatggcgtgggctatcagccataccgggtggtggtgctgtcttttgagctgctgcacgcaccagcaaccgtgtgcggccccaagaagagcacacatcatcaccaccaccaccaccactga

SEQ ID NO: 5852 - DNA, 735 bp, Artificial Sequence
  Description of Artificial Sequence: Synthetic polynucleotide
atgggcatcctgccaagcccaggaatgcccgccctgctgtctctggtgagcctgctgtccgtgctgctgatgggatgcgtggcagagacaggcacaaggttccctaacatcaccaatctgtgcccattcggcgaggtgtttaacgccacacgctttgcctccgtgtatgcctggaaccggaagagaatctctaattgcgtggccgactatagcgtgctgtacaatagcgcctccttctctacctttaagtgctatggcgtgagccccaccaagctgaacgatctgtgcttcacaaacgtgtacgccgactcctttgtgatccggggcgatgaagtgagacagatcgcaccaggacagaccggaaagatcgcagactacaactataagctgcctgacgatttcacaggctgcgtgatcgcctggaatagcaacaatctggattccaaagtgggcggcaactacaattatctgtacaggctgttccgcaagtccaacctgaagccatttgagcgggacatctccaccgatatctaccaggccggctctacaccctgcaacggcgtggagggcttcaattgttattttcccctgcagtcttacggcttccagcctacaaatggcgtgggctatcagccataccgggtggtggtgctgtcttttgagctgctgcacgcaccagcaaccgtgtgcggccccaagaagagcacacatcatcaccaccaccaccaccactga

SEQ ID NO: 5853 - DNA, 735 bp, Artificial Sequence
  Description of Artificial Sequence: Synthetic polynucleotide
atgggcatcctgccaagcccaggaatgcccgccctgctgtctctggtgagcctgctgtccgtgctgctgatgggatgcgtggcagagacaggcacaaggttccctaacatcaccaatctgtgcccattcggcgaggtgtttaacgccacacgctttgcctccgtgtatgcctggaaccggaagagaatctctaattgcgtggccgactatagcgtgctgtacaatagcgcctccttctctacctttaagtgctatggcgtgagccccaccaagctgaacgatctgtgcttcacaaacgtgtacgccgactcctttgtgatccggggcgatgaagtgagacagatcgcaccaggacagaccggaaagatcgcagactacaactataagctgcctgacgatttcacaggctgcgtgatcgcctggaatagcaacaatctggattccaaagtgggcggcaactacaattatctgtacaggctgttccgcaagtccaacctgaagccatttgagcggtatatctccaccgagatctaccaggccggctctacaccctgcaacggcgtggagggcttcaattgttattttcccctgcagtcttacggcttccagcctacaaatggcgtgggctatcagccataccgggtggtggtgctgtcttttgagctgctgcacgcaccagcaaccgtgtgcggccccaagaagagcacacatcatcaccaccaccaccaccactga

SEQ ID NO: 5854 - DNA, 735 bp, Artificial Sequence
  Description of Artificial Sequence: Synthetic polynucleotide
atgggcatcctgccaagcccaggaatgcccgccctgctgtctctggtgagcctgctgtccgtgctgctgatgggatgcgtggcagagacaggcacaaggttccctaacatcaccaatctgtgcccattcggcgaggtgtttaacgccacacgctttgcctccgtgtatgcctggaaccggaagagaatctctaattgcgtggccgactatagcgtgctgtacaatagcgcctccttctctacctttaagtgctatggcgtgagccccaccaagctgaacgatctgtgcttcacaaacgtgtacgccgactcctttgtgatccggggcgatgaagtgagacagatcgcaccaggacagaccggaaagatcgcagactacacgtataagctgcctgacgatttcacaggctgcgtgatcgcctggaatagcaacaatctggattccaaagtgggcggcaactacaattatctgtacaggctgttccgcaagtccaacctgaagccatttgagcgggacatctccaccgagatctaccaggccggctctacaccctgcaacggcgtggagggcttcaattgttattttcccctgcagtcttacggcttccagcctacaaatggcgtgggctatcagccataccgggtggtggtgctgtcttttgagctgctgcacgcaccagcaaccgtgtgcggccccaagaagagcacacatcatcaccaccaccaccaccactga

SEQ ID NO: 5855 - DNA, 735 bp, Artificial Sequence
  Description of Artificial Sequence: Synthetic polynucleotide
atgggcatcctgccaagcccaggaatgcccgccctgctgtctctggtgagcctgctgtccgtgctgctgatgggatgcgtggcagagacaggcacaaggttccctaacatcaccaatctgtgcccattcggcgagatttttaacgccacacgctttgcctccgtgtatgcctggaaccggaagagaatctctaattgcgtggccgactatagcgtgctgtacaatagcgcctccttctctacctttaagtgctatggcgtgagccccaccaagctgaacgatctgtgcttcacaaacgtgtacgccgactcctttgtgatccggggcgatgaagtgagacagatcgcaccaggacagaccggaaagatcgcagactacaactataagctgcctgacgatttcacaggctgcgtgatcgcctggaatagcaacaatctggattccaaagtgggcggcaactacaattatctgtacaggctgttccgcaagtccaacctgaagccatttgagcgggacatctccaccgagatctaccaggccggctctacaccctgcaacggcgtggagggcttcaattgttattttcccctgcagtcttacggcttccagcctacaaatggcgtgggctatcagccataccgggtggtggtgctgtcttttgagctgctgcacgcaccagcaaccgtgtgcggccccaagaagagcacacatcatcaccaccaccaccaccactga

SEQ ID NO: 5856 - DNA, 735 bp, Artificial Sequence
  Description of Artificial Sequence: Synthetic polynucleotide
atgggcatcctgccaagcccaggaatgcccgccctgctgtctctggtgagcctgctgtccgtgctgctgatgggatgcgtggcagagacaggcacaaggttccctaacatcaccaatctgtgcccattcggcgaggtgtttaacgccacacgctttgcctccgtgtatgcctggaaccggaagagaatctctaattgcgtggccgactatagcgtgctgtacaatagcgcctccttctctacctttaagtgctatggcgtgagccccaccaagctgaacgatctgtgcttcacaaacgtgtacgccgacatttttgtgatccggggcgatgaagtgagacagatcgcaccaggacagaccggaaagatcgcagactacaactataagctgcctgacgatttcacaggctgcgtgatcgcctggaatagcaacaatctggattccaaagtgggcggcaactacaattatctgtacaggctgttccgcaagtccaacctgaagccatttgagcgggacatctccaccgagatctaccaggccggctctacaccctgcaacggcgtggagggcttcaattgttattttcccctgcagtcttacggcttccagcctacaaatggcgtgggctatcagccataccgggtggtggtgctgtcttttgagctgctgcacgcaccagcaaccgtgtgcggccccaagaagagcacacatcatcaccaccaccaccaccactga

SEQ ID NO: 5857 - DNA, 735 bp, Artificial Sequence
  Description of Artificial Sequence: Synthetic polynucleotide
atgggcatcctgccaagcccaggaatgcccgccctgctgtctctggtgagcctgctgtccgtgctgctgatgggatgcgtggcagagacaggcacaaggttccctaacatcaccaatctgtgcccattcggcgaggtgtttaacgccacacgcttttgttccgtgtatgcctggaaccggaagagaatctctaattgcgtggccgactatagcgtgctgtacaatagcgcctccttctctacctttaagtgctatggcgtgagccccaccaagctgaacgatctgtgcttcacaaacgtgtacgccgactcctttgtgatccggggcgatgaagtgagacagatcgcaccaggacagaccggaaagatcgcagactacaactataagctgcctgacgatttcacaggctgcgtgatcgcctggaatagcaacaatctggattccaaagtgggcggcaactacaattatctgtacaggctgttccgcaagtccaacctgaagccatttgagcgggacatctccaccgagatctaccaggccggctctacaccctgcaacggcgtggagggcttcaattgttattttcccctgcagtcttacggcttccagcctacaaatggcgtgggctatcagccataccgggtggtggtgctgtcttttgagctgctgcacgcaccagcaaccgtgtgcggccccaagaagagcacacatcatcaccaccaccaccaccactga

SEQ ID NO: 5858 - DNA, 735 bp, Artificial Sequence
  Description of Artificial Sequence: Synthetic polynucleotide
atgggcatcctgccaagcccaggaatgcccgccctgctgtctctggtgagcctgctgtccgtgctgctgatgggatgcgtggcagagacaggcacaaggttccctaacatcaccaatctgtgcccattcggcgaggtgtttaacgccacacgctttgcctccgtgtatgcctggaaccggaagagaatctctaattgcgtggccgactatagcgtgctgtacaatagcgcctccttctctacctttaagtgctatggcgtgagccccaccaagctgaacgatctgtgcttcacaaacgtgtacgccgactcctttgtgatccggggcgatgaagtgagacagatcgcaccaggacagaccggaaagatcgcagactacaactataagctgcctgacgatttcacaggctgcgtgatcgcctggaatagcaacaatctggattccaaagtgggcggcaactacaattatctgtacaggctgttccgcaagtccaacctgaagccatttgagcgggacatctccaccgagatctaccaggccggctctacaccctgcaacggcgtggagggcttcaattgttattttcccctgcagtcttacggcttccagcctacaaatggcgtgggctatcagccataccgggtggtggtgctgtcttttgagctggctcacgcaccagcaaccgtgtgcggccccaagaagagcacacatcatcaccaccaccaccaccactga

SEQ ID NO: 5859 - DNA, 735 bp, Artificial Sequence
  Description of Artificial Sequence: Synthetic polynucleotide
atgggcatcctgccaagcccaggaatgcccgccctgctgtctctggtgagcctgctgtccgtgctgctgatgggatgcgtggcagagacaggcacaaggttccctaacatcaccaatctgtgcccattcggcgaggtgtttaacgccacacgctttgcctccgtgtatgcctggaaccggaagagaatctctaattgcgtggccgactatagcgtgctgtacaatagcgcctccttctctacctttaagtgctatggcgtgagccccaccaagctgaacgatctgtgcttcacaaacgtgtacgccgactcctttgtgatccggggcgatgaagtgagacagatcgcaccaggacagaccggaaagatcgcagactacaactataagctgcctgacgatttcacaggctgcgtgatcgcctggaatagcaacaatctggattccaaagtgggcggcaactacaattatctgtacaggctgttccgcaagtccaacctgaagccatttgagcgggacatctccaccgagatctaccaggccggctctacaccctgcaacggcgtggagggcttcaattgttattttcccctgcagtcttacggcttccagcctacaaatggcgtgggctatcagccataccgggtggtggtgctgtcttttgagctgcaacacgcaccagcaaccgtgtgcggccccaagaagagcacacatcatcaccaccaccaccaccactga

SEQ ID NO: 5860 - DNA, 735 bp, Artificial Sequence
  Description of Artificial Sequence: Synthetic polynucleotide
atgggcatcctgccaagcccaggaatgcccgccctgctgtctctggtgagcctgctgtccgtgctgctgatgggatgcgtggcagagacaggcacaaggttccctaacatcaccaatctgtgcccattcggcgaggtgtttaacgccacacgctttgcctccgtgtatgcctggaaccggaagagaatctctaattgcgtggccgactatagcgtgctgtacaatagcgcctccttctctacctttaagtgctatggcgtgagccccaccaagctgaacgatctgtgcttcacaaacgtgtacgccgactcctttgtgatccggggcgatgaagtgagacagatcgcaccaggacagaccggaaagatcgcagactacaactataagctgcctgacgatttcacaggctgcgtgatcgcctggaatagcaacaatctggattccaaagtgggcggcaactacaattatctgtacaggctgttccgcaagtccaacctgaagccatttgagcgggacatctccaccgagatctaccaggccggctctacaccctgcaacggcgtggagggcttcaattgttattttcccctgcagtcttacgctttccagcctacaaatggcgtgggctatcagccataccgggtggtggtgctgtcttttgagctgctgcacgcaccagcaaccgtgtgcggccccaagaagagcacacatcatcaccaccaccaccaccactga

SEQ ID NO: 5861 - DNA, 735 bp, Artificial Sequence
  Description of Artificial Sequence: Synthetic polynucleotide
atgggcatcctgccaagcccaggaatgcccgccctgctgtctctggtgagcctgctgtccgtgctgctgatgggatgcgtggcagagacaggcacaaggttccctaacatcaccaatctgtgcccattcggcgaggtgtttaacgccacacgctttgcctccgtgtatgcctggaaccggaagagaatctctaattgcgtggccgactatagcgtgctgtacaatagcgcctccttctctacctttaagtgctatggcgtgagccccaccaagctgaacgatctgtgcttcacaaacgtgtacgccgactcctttgtgatccggggcgatgaagtgagacagatcgcaccaggacagaccggaaagatcgcagactacaactatctcctgcctgacgatttcacaggctgcgtgatcgcctggaatagcaacaatctggattccaaagtgggcggcaactacaattatctgtacaggctgttccgcaagtccaacctgaagccatttgagcgggacatctccaccgagatctaccaggccggctctacaccctgcaacggcgtggagggcttcaattgttattttcccctgcagtcttacggcttccagcctacaaatggcgtgggctatcagccataccgggtggtggtgctgtcttttgagctgctgcacgcaccagcaaccgtgtgcggccccaagaagagcacacatcatcaccaccaccaccaccactga

SEQ ID NO: 5862 - DNA, 735 bp, Artificial Sequence
  Description of Artificial Sequence: Synthetic polynucleotide
atgggcatcctgccaagcccaggaatgcccgccctgctgtctctggtgagcctgctgtccgtgctgctgatgggatgcgtggcagagacaggcacaaggttccctaacatcaccaatctgtgcccattcggcgaggtgtttaacgccacacgctttgcctccgtgtatgcctggaaccggaagagaatctctaattgcgtggccgactatagcgtgctgtacaatagcgcctccttctctacctttaagtgctatggcgtgagccccaccaagctgaacgatctgtgcttcacaaacgtgtacgccgactcctttgtgatccggggcgatgaagtgagacagatcgcaccaggacagaccggaaagatcgcagactacaactataagctgcctgacgatttcacaggctgcgtgatcgcctggaatagcaacaatctggattccaaagtgggcggcaactacaattatctgtacaggctgttccgcaagtccaacctgaagccatttgagcgggacatctccaccgagatctaccaggccggctctacaccctcaaacggcgtggagggcttcaattgttattttcccctgcagtcttacggcttccagcctacaaatggcgtgggctatcagccataccgggtggtggtgctgtcttttgagctgctgcacgcaccagcaaccgtgtgcggccccaagaagagcacacatcatcaccaccaccaccaccactga

SEQ ID NO: 5863 - DNA, 735 bp, Artificial Sequence
  Description of Artificial Sequence: Synthetic polynucleotide
atgggcatcctgccaagcccaggaatgcccgccctgctgtctctggtgagcctgctgtccgtgctgctgatgggatgcgtggcagagacaggcacaaggttccctaacatcaccaatctgtgcccattcggcgaggtgtttaacgccacacgctttgcctccgtgtatgcctggaaccggaagagaatctctaattgcgtggccgactatagcaatctgtacaatagcgcctccttctctacctttaagtgctatggcgtgagccccaccaagctgaacgatctgtgcttcacaaacgtgtacgccgactcctttgtgatccggggcgatgaagtgagacagatcgcaccaggacagaccggaaagatcgcagactacaactataagctgcctgacgatttcacaggctgcgtgatcgcctggaatagcaacaatctggattccaaagtgggcggcaactacaattatctgtacaggctgttccgcaagtccaacctgaagccatttgagcgggacatctccaccgagatctaccaggccggctctacaccctgcaacggcgtggagggcttcaattgttattttcccctgcagtcttacggcttccagcctacaaatggcgtgggctatcagccataccgggtggtggtgctgtcttttgagctgctgcacgcaccagcaaccgtgtgcggccccaagaagagcacacatcatcaccaccaccaccaccactga

SEQ ID NO: 5864 - DNA, 735 bp, Artificial Sequence
  Description of Artificial Sequence: Synthetic polynucleotide
atgggcatcctgccaagcccaggaatgcccgccctgctgtctctggtgagcctgctgtccgtgctgctgatgggatgcgtggcagagacaggcacaaggttccctaacatcaccaatctgtgcccattcggcgaggtgtttaacgccacacgctttgcctccgtgtatgcctggaaccggaagagaatctctaattgcgtggccgactatagcgtgctgtacgaaagcgcctccttctctacctttaagtgctatggcgtgagccccaccaagctgaacgatctgtgcttcacaaacgtgtacgccgactcctttgtgatccggggcgatgaagtgagacagatcgcaccaggacagaccggaaagatcgcagactacaactataagctgcctgacgatttcacaggctgcgtgatcgcctggaatagcaacaatctggattccaaagtgggcggcaactacaattatctgtacaggctgttccgcaagtccaacctgaagccatttgagcgggacatctccaccgagatctaccaggccggctctacaccctgcaacggcgtggagggcttcaattgttattttcccctgcagtcttacggcttccagcctacaaatggcgtgggctatcagccataccgggtggtggtgctgtcttttgagctgctgcacgcaccagcaaccgtgtgcggccccaagaagagcacacatcatcaccaccaccaccaccactga

SEQ ID NO: 5865 - DNA, 735 bp, Artificial Sequence
  Description of Artificial Sequence: Synthetic polynucleotide
atgggcatcctgccaagcccaggaatgcccgccctgctgtctctggtgagcctgctgtccgtgctgctgatgggatgcgtggcagagacaggcacaaggttccctaacatcaccaatctgtgcccattcggcgaggtgtttaacgccacacgctttgcctccgtgtatgcctggaaccggaagagaatctctaattgcgtggccgactatagcgtgctgtacaatagcgcctccttctctacctttaagtgctatggcgtgagccccaccaagctgaacgatctgtgcttcacaaacgtgtacgccgactcctttgtgatccggggcgatgaagtgagacagatcgcaccaggacagaccggaaagatcgcagactacaactataagctgcctgacgatttcacaggctgcgtgatcgcctggaatagcaacaatctggattccaaagtgggcggcaactacaattatctgtacaggctgttccgcaagtccaacctgaagccatttgagcgggacatctccaccgagatctaccaggccggctctacaccctgcaacggcgtggagggcttcaattgttattttcccctgcagtcttacggcttccagcctacaaatggcgtgggctatcagccataccgggtggtggtgctgtcttttgagctgctgagtgcaccagcaaccgtgtgcggccccaagaagagcacacatcatcaccaccaccaccaccactga

SEQ ID NO: 5866 - DNA, 735 bp, Artificial Sequence
  Description of Artificial Sequence: Synthetic polynucleotide
atgggcatcctgccaagcccaggaatgcccgccctgctgtctctggtgagcctgctgtccgtgctgctgatgggatgcgtggcagagacaggcacaaggttccctaacatcaccaatctgtgcccattcggcgaggtgtttaacgccacacgctttgcctccgtgtatgcctggaaccggaagagaatctctaattgcgtggccgactatagcgtgctgtacaatagcgcctccttctctacctttaagtgctatggcgtgagccccaccaagctgaacgatctgtgcttcacaaacgtgtacgccgactcctttgtgatccggggcgatgaagtgagacagatcgcaccaggacagaccggaaagatcgcagactacaactataagctgcctgacgatttcacaggctgcgtgatcgcctggaatagcaacaatctggattccaaagtgggcggcaactacaattatctgtacaggctgttccgcaagtccaacctgaagccatttgagcgggacatctccaccgagtactaccaggccggctctacaccctgcaacggcgtggagggcttcaattgttattttcccctgcagtcttacggcttccagcctacaaatggcgtgggctatcagccataccgggtggtggtgctgtcttttgagctgctgcacgcaccagcaaccgtgtgcggccccaagaagagcacacatcatcaccaccaccaccaccactga

SEQ ID NO: 5867 - DNA, 735 bp, Artificial Sequence
  Description of Artificial Sequence: Synthetic polynucleotide
atgggcatcctgccaagcccaggaatgcccgccctgctgtctctggtgagcctgctgtccgtgctgctgatgggatgcgtggcagagacaggcacaaggttccctaacatcaccaatctgtgcccattcggcgaggtgtttaacgccacacgctttgcctccgtgtatgcctggaaccggaagagaatctctaattgcgtggccgactatagcgtgctgtacaatagcgcctccttctctacctttaagtgctatggcgtgagccccaccaagctgaacgatctgtgcttcccgaacgtgtacgccgactcctttgtgatccggggcgatgaagtgagacagatcgcaccaggacagaccggaaagatcgcagactacaactataagctgcctgacgatttcacaggctgcgtgatcgcctggaatagcaacaatctggattccaaagtgggcggcaactacaattatctgtacaggctgttccgcaagtccaacctgaagccatttgagcgggacatctccaccgagatctaccaggccggctctacaccctgcaacggcgtggagggcttcaattgttattttcccctgcagtcttacggcttccagcctacaaatggcgtgggctatcagccataccgggtggtggtgctgtcttttgagctgctgcacgcaccagcaaccgtgtgcggccccaagaagagcacacatcatcaccaccaccaccaccactga

SEQ ID NO: 5868 - DNA, 735 bp, Artificial Sequence
  Description of Artificial Sequence: Synthetic polynucleotide
atgggcatcctgccaagcccaggaatgcccgccctgctgtctctggtgagcctgctgtccgtgctgctgatgggatgcgtggcagagacaggcacaaggttccctaacatcaccaatctgtgcccattcggcgaggtgtttaacgccacacgctttgcctccgtgtatgcctggaaccggaagagaatctctaattgcgtggccgactatagcgtgctgtacaatagcgcctccttctctacctttaagtgctatggcgtgagccccaccaagctgaacgatctgtgcttcacaaacgtgtacgccgactcctttgtgatccggggcgatgaagtgagacagatcgcaccaggacagaccggaaagatcgcagactacaactataagctgcctgacgatttcacaggctgcgtgatcgcctggaatagcaacaatctggattccaaagtgggcggcaactacaattatctgtacaggctgttccgcaagtccaacctgaagccatttgagcgggacatctccaccgagatctaccaggccggctctacaccctgcaacggcgtggagggcttcaattgttattttcccctgcagtcttacggcttccagcctacaaatggcgtgggctatcagccataccgggtggtggtgctgaattttgagctgctgcacgcaccagcaaccgtgtgcggccccaagaagagcacacatcatcaccaccaccaccaccactga

SEQ ID NO: 5869 - DNA, 735 bp, Artificial Sequence
  Description of Artificial Sequence: Synthetic polynucleotide
atgggcatcctgccaagcccaggaatgcccgccctgctgtctctggtgagcctgctgtccgtgctgctgatgggatgcgtggcagagacaggcacaaggttccctaacatcaccaatctgtgcccattcggcgaggtgtttaacgccacacgctttgcctccgtgtataattggaaccggaagagaatctctaattgcgtggccgactatagcgtgctgtacaatagcgcctccttctctacctttaagtgctatggcgtgagccccaccaagctgaacgatctgtgcttcacaaacgtgtacgccgactcctttgtgatccggggcgatgaagtgagacagatcgcaccaggacagaccggaaagatcgcagactacaactataagctgcctgacgatttcacaggctgcgtgatcgcctggaatagcaacaatctggattccaaagtgggcggcaactacaattatctgtacaggctgttccgcaagtccaacctgaagccatttgagcgggacatctccaccgagatctaccaggccggctctacaccctgcaacggcgtggagggcttcaattgttattttcccctgcagtcttacggcttccagcctacaaatggcgtgggctatcagccataccgggtggtggtgctgtcttttgagctgctgcacgcaccagcaaccgtgtgcggccccaagaagagcacacatcatcaccaccaccaccaccactga

SEQ ID NO: 5870 - DNA, 735 bp, Artificial Sequence
  Description of Artificial Sequence: Synthetic polynucleotide
atgggcatcctgccaagcccaggaatgcccgccctgctgtctctggtgagcctgctgtccgtgctgctgatgggatgcgtggcagagacaggcacaaggttccctaacatcaccaatctgtgcccattcggcgaggtgtttaacgccacacgctttgcctccgtgtatgcctggaaccggaagagaatctctaattgcgtggccgactatagcgtgctgtacaatagcgcctccttctctacctttaagtgctatggcgtgagccccaccaagctgaacgatctgtgcttcacaaacgtgtacgccgactcctttgtgatccggggcgatgaagtgagacagatcgcaccaggacagaccggaaagatcgcagactacaactataagctgcctgacgatttcacaggctgcgtgatcgcctggaatagcaacgagctggattccaaagtgggcggcaactacaattatctgtacaggctgttccgcaagtccaacctgaagccatttgagcgggacatctccaccgagatctaccaggccggctctacaccctgcaacggcgtggagggcttcaattgttattttcccctgcagtcttacggcttccagcctacaaatggcgtgggctatcagccataccgggtggtggtgctgtcttttgagctgctgcacgcaccagcaaccgtgtgcggccccaagaagagcacacatcatcaccaccaccaccaccactga

SEQ ID NO: 5871 - DNA, 735 bp, Artificial Sequence
  Description of Artificial Sequence: Synthetic polynucleotide
atgggcatcctgccaagcccaggaatgcccgccctgctgtctctggtgagcctgctgtccgtgctgctgatgggatgcgtggcagagacaggcacaaggttccctaacatcaccaatctgtgcccattcggcgaggtgtttaacgccacacgctttgcctccgtgtatgcctggaaccggaagagaatctctaattgcgtggccgactatagcgtgctgtacaatagcgcctccttctctacctttaagtgctatggcgtgagccccaccaagctgaacgatctgtgcttcacaaacgtgtacgccgactcctttgtgatccggggcgatgaagtgagacagatcgcaccaggacagaccggaaagatcgcagactacaactataagctgcctgacgatttcacaggctgcgtgatcgcctggaatagcaacaatctggattccaaagtgggcggcaactacaattatctgtacaggctgttccgcaagtccaacctgtgtccatttgagcgggacatctccaccgagatctaccaggccggctctacaccctgcaacggcgtggagggcttcaattgttattttcccctgcagtcttacggcttccagcctacaaatggcgtgggctatcagccataccgggtggtggtgctgtcttttgagctgctgcacgcaccagcaaccgtgtgcggccccaagaagagcacacatcatcaccaccaccaccaccactga

SEQ ID NO: 5872 - DNA, 735 bp, Artificial Sequence
  Description of Artificial Sequence: Synthetic polynucleotide
atgggcatcctgccaagcccaggaatgcccgccctgctgtctctggtgagcctgctgtccgtgctgctgatgggatgcgtggcagagacaggcacaaggttccctaacatcaccaatctgtgcccattcggcgaggtgtttaacgccacacgctttgcctccgtgtatgcctggaaccggaagagaatctctaattgcgtggccgactatagcgtgctgtacaatagcgcctccttctctacctttaagtgctatggcgtgagccccaccaagctgaacgatctgtgcttcacaaacgtgtacgccgactcctttgtgatccggggcgatgaagtgagacagatcgcaccaggacagaccggaaagatcgcagactacaactataagctgcctgacgatttcacaggctgcgtgatcgcctggaatagcaacaatctggattccaaagtgggcggcaactacaattatctgtacaggctgttccgcaagtccaacctgaagccatttgagcgggacatctccaccgaggattaccaggccggctctacaccctgcaacggcgtggagggcttcaattgttattttcccctgcagtcttacggcttccagcctacaaatggcgtgggctatcagccataccgggtggtggtgctgtcttttgagctgctgcacgcaccagcaaccgtgtgcggccccaagaagagcacacatcatcaccaccaccaccaccactga

SEQ ID NO: 5873 - DNA, 735 bp, Artificial Sequence
  Description of Artificial Sequence: Synthetic polynucleotide
atgggcatcctgccaagcccaggaatgcccgccctgctgtctctggtgagcctgctgtccgtgctgctgatgggatgcgtggcagagacaggcacaaggttccctaacatcaccaatctgtgcccattcggcgaggtgtttaacgccacacgctttgcctccgtgtatgcctggaaccggaagagaatgtctaattgcgtggccgactatagcgtgctgtacaatagcgcctccttctctacctttaagtgctatggcgtgagccccaccaagctgaacgatctgtgcttcacaaacgtgtacgccgactcctttgtgatccggggcgatgaagtgagacagatcgcaccaggacagaccggaaagatcgcagactacaactataagctgcctgacgatttcacaggctgcgtgatcgcctggaatagcaacaatctggattccaaagtgggcggcaactacaattatctgtacaggctgttccgcaagtccaacctgaagccatttgagcgggacatctccaccgagatctaccaggccggctctacaccctgcaacggcgtggagggcttcaattgttattttcccctgcagtcttacggcttccagcctacaaatggcgtgggctatcagccataccgggtggtggtgctgtcttttgagctgctgcacgcaccagcaaccgtgtgcggccccaagaagagcacacatcatcaccaccaccaccaccactga

SEQ ID NO: 5874 - DNA, 735 bp, Artificial Sequence
  Description of Artificial Sequence: Synthetic polynucleotide
atgggcatcctgccaagcccaggaatgcccgccctgctgtctctggtgagcctgctgtccgtgctgctgatgggatgcgtggcagagacaggcacaaggttccctaacatcaccaatctgtgcccattcggcgaggtgtttaacgccacacgctttgcctccgtgtatgcctggaaccggaagagaatctctaattgcgtggccgactatagcgtgctgtacaatagcgcctccttctctacctttaagtgctatggcgtgagccccaccaagctgaacgatctgtgcttcacaaacgtgtacgccgactcctttgtgatccggggcgatgaagtgagacagatcgcaccaggacagaccggaaagatcgcagactacaactataagctgcctgacgatttcacaggctgcgtgatcgcctggaatagcaacaatctggattccaaagtgggcggcaactacaattatctgtacaggctgttccgcaagtccaacctgaagccatttgagcgggacatctccaccgagatctaccaggccggctctacacccgggaacggcgtggagggcttcaattgttattttcccctgcagtcttacggcttccagcctacaaatggcgtgggctatcagccataccgggtggtggtgctgtcttttgagctgctgcacgcaccagcaaccgtgtgcggccccaagaagagcacacatcatcaccaccaccaccaccactga

SEQ ID NO: 5875 - DNA, 735 bp, Artificial Sequence
  Description of Artificial Sequence: Synthetic polynucleotide
atgggcatcctgccaagcccaggaatgcccgccctgctgtctctggtgagcctgctgtccgtgctgctgatgggatgcgtggcagagacaggcacaaggttccctaacatcaccaatctgtgcccattcggcgaggtgtttaacgccacacgctttgcctccgtgtatgcctggaaccggaagagaatctctaattgcgtggccgactatagcgtgctgtacaatagcgcctccttctctacctttaagtgctatggcgtgagccccaccaagctgaacgatctgtgcttcacaaacgtgtacgccgactcctttgtgatccggggcgatgaagtgagacagatcgcaccaggacagaccggaaagatcgcagactacaactataagctgcctgacgatttcacaggctgcgtgatcgcctggaatagcaacaatctggattccaaagtgggcggcaactacaattatctgtacaggctgttccgcaagtccaacctgaagccatttgagcgggacatccttaccgagatctaccaggccggctctacaccctgcaacggcgtggagggcttcaattgttattttcccctgcagtcttacggcttccagcctacaaatggcgtgggctatcagccataccgggtggtggtgctgtcttttgagctgctgcacgcaccagcaaccgtgtgcggccccaagaagagcacacatcatcaccaccaccaccaccactga

SEQ ID NO: 5876 - DNA, 735 bp, Artificial Sequence
  Description of Artificial Sequence: Synthetic polynucleotide
atgggcatcctgccaagcccaggaatgcccgccctgctgtctctggtgagcctgctgtccgtgctgctgatgggatgcgtggcagagacaggcacaaggttccctaacatcaccaatctgtgcccattcggcgaggtgtttaacgccacacgctttgcctccgtgtatgcctggaaccggaagagaatctctaattgcgtggccgactatagcgtgctgtacaatagcgcctccttctctacctttaagtgctatggcgtgagccccaccaagctgaacgatctgtgcttcacaaacgtgtacgccgactcctttgtgatccggggcgatgaagtgagacagatcgcaccaggacagaccggaaagatcgcagactacaactataagctgcctgacgatttcacaggctgcgtgatcgcctggaatagcaacaatctggattccaaagtgggcggcaactacaattatctgtacaggctgttccgcaagtccaacctgaagccatttgagcgggacatctccatggagatctaccaggccggctctacaccctgcaacggcgtggagggcttcaattgttattttcccctgcagtcttacggcttccagcctacaaatggcgtgggctatcagccataccgggtggtggtgctgtcttttgagctgctgcacgcaccagcaaccgtgtgcggccccaagaagagcacacatcatcaccaccaccaccaccactga

SEQ ID NO: 5877 - DNA, 735 bp, Artificial Sequence
  Description of Artificial Sequence: Synthetic polynucleotide
atgggcatcctgccaagcccaggaatgcccgccctgctgtctctggtgagcctgctgtccgtgctgctgatgggatgcgtggcagagacaggcacaaggttccctaacatcaccaatctgtgcccattcggcgaggtgtttaacgccacacgctttgcctccgtgtatgcctggaaccggaagagaatctctaattgcgtggccgactatagcgtgctgtacaatagcgcctccttctctacctttaagtgctatggcgtgagccccaccaagctgaacgatctgtgcttcacaaacgtgtacgccgactcctttgtgatccggggcgatgaagtgagacagatcgcaccaggacagaccggaaagatcgcagactacaactataagctgcctgacgatttcacaggctgcgtgatcgcctggaatagcaacaatctggattccaaagtgggcggcaactacaattatctgtacaggctgttccgcaagtccaacctggagccatttgagcgggacatctccaccgagatctaccaggccggctctacaccctgcaacggcgtggagggcttcaattgttattttcccctgcagtcttacggcttccagcctacaaatggcgtgggctatcagccataccgggtggtggtgctgtcttttgagctgctgcacgcaccagcaaccgtgtgcggccccaagaagagcacacatcatcaccaccaccaccaccactga

SEQ ID NO: 5878 - DNA, 735 bp, Artificial Sequence
  Description of Artificial Sequence: Synthetic polynucleotide
atgggcatcctgccaagcccaggaatgcccgccctgctgtctctggtgagcctgctgtccgtgctgctgatgggatgcgtggcagagacaggcacaaggttccctaacatcaccaatctgtgcccattcggcgaggtgtttaacgccacacgctttgcctccgtgtatgcctggaaccggaagagaatctctaattgcgtggccgactatagcgtgctgtacaatagcgcctccttctctacctttaagtgctatggcgtgagccccaccaagctgaacgatctgtgcttcacaaacgtgtacgccgactcctttgtgatccggggcgatgaagtgagacagatcgcaccaggacagaccggaaaggtcgcagactacaactataagctgcctgacgatttcacaggctgcgtgatcgcctggaatagcaacaatctggattccaaagtgggcggcaactacaattatctgtacaggctgttccgcaagtccaacctgaagccatttgagcgggacatctccaccgagatctaccaggccggctctacaccctgcaacggcgtggagggcttcaattgttattttcccctgcagtcttacggcttccagcctacaaatggcgtgggctatcagccataccgggtggtggtgctgtcttttgagctgctgcacgcaccagcaaccgtgtgcggccccaagaagagcacacatcatcaccaccaccaccaccactga

SEQ ID NO: 5879 - DNA, 735 bp, Artificial Sequence
  Description of Artificial Sequence: Synthetic polynucleotide
atgggcatcctgccaagcccaggaatgcccgccctgctgtctctggtgagcctgctgtccgtgctgctgatgggatgcgtggcagagacaggcacaaggttccctaacatcaccaatctgtgcccattcggcgaggtgtttaacgccacacgctttgcctccgtgtatgcctggaaccggaagagaatctctaattgcgtggccgactatagcgtgctgtacaatagcgcctccttctctacctttaagtgctatggcgtgagccccaccaagctgaacgatctgtgcttcacaaacgtgtacgccgactcctttgtgatccggggcgatgaagtgagacagatcgcaccaggacagaccggaaagatcgcagactacaactataagctgcctgacgatttcacaggctgcgtgatcgcctggaatagcaacaatctggattccaaagtgggcggcaactacaattatctgtacaggctgttccgcaagtccaacctgaagccatttgagcgggacatctccaccgctatctaccaggccggctctacaccctgcaacggcgtggagggcttcaattgttattttcccctgcagtcttacggcttccagcctacaaatggcgtgggctatcagccataccgggtggtggtgctgtcttttgagctgctgcacgcaccagcaaccgtgtgcggccccaagaagagcacacatcatcaccaccaccaccaccactga

SEQ ID NO: 5880 - DNA, 735 bp, Artificial Sequence
  Description of Artificial Sequence: Synthetic polynucleotide
atgggcatcctgccaagcccaggaatgcccgccctgctgtctctggtgagcctgctgtccgtgctgctgatgggatgcgtggcagagacaggcacaaggttccctaacatcaccaatctgtgcccattcggcgaggtgtttaacgccacacgctttgcctccgtgtatgcctggaaccggaagagaatctctaattgcgtggccgactatagcgtgctgtacaatagcgcctccttctctacctttaagtgctatggcgtgagccccaccaagctgaacgatctgtgcttcacaaacgtgtacgccgactcctttgtgatccggggcgatgaagtgagacagatcgcaccaggacagaccggaaagatcgcagactacaactataagctgcctgacgatttcacaggctgcgtgatcgcctggaatagcaacaatctggattccaaagtgggcggcaactacaattatctgtacaggctgttccgcaagtccaacctgaagccatttgagcgggacatctccaccgagatctaccaggccggctctacaccctgcaacggcgtggagggcttcaattgttattttcccctgcagtcttacggcttccagcctacaaatggcgtgggctatcagccataccgggtggtggtgctgtcttttgagctgctgtgtgcaccagcaaccgtgtgcggccccaagaagagcacacatcatcaccaccaccaccaccactga

SEQ ID NO: 5881 - DNA, 735 bp, Artificial Sequence
  Description of Artificial Sequence: Synthetic polynucleotide
atgggcatcctgccaagcccaggaatgcccgccctgctgtctctggtgagcctgctgtccgtgctgctgatgggatgcgtggcagagacaggcacaaggttccctaacatcaccaatctgtgcccattcggcgaggtgtttaacgccacacgctttgcctccgtgtatgcctggaaccggaagagaatctctaattgcgtggccgactatagcgtgctgtacaatagcgcctccttctctacctttaagtgctatggcgtgagccccaccaagctgaacgatctgtgcttcacaaacgtgtacgccgactcctttgtgatccggggcgatgaagtgagacagatcgcaccaggacagaccggaaagatcgcagactacaactataagctgcctgacgatttcacaggctgcgtgatcgcctggaatagcaacaatctggattccaaagtgggcggcaactacaattatctgtacaggctgttccgcaagtccaacctgaagccatttgagcgggacatctccaccgagatctaccaggccggctctacagtatgcaacggcgtggagggcttcaattgttattttcccctgcagtcttacggcttccagcctacaaatggcgtgggctatcagccataccgggtggtggtgctgtcttttgagctgctgcacgcaccagcaaccgtgtgcggccccaagaagagcacacatcatcaccaccaccaccaccactga

SEQ ID NO: 5882 - DNA, 735 bp, Artificial Sequence
  Description of Artificial Sequence: Synthetic polynucleotide
atgggcatcctgccaagcccaggaatgcccgccctgctgtctctggtgagcctgctgtccgtgctgctgatgggatgcgtggcagagacaggcacaaggttccctaacatcaccaatctgtgcccattcggcgaggtgtttaacgccacacgctttgcctccgtgtatgcctggaaccggaagagaatctctaattgcgtggccgactatagcgtgctgtacaatagcgcctccttctctacctttaagtgctatggcgtgagccccaccaagctgaacgatctgtgcttcacaaacgtgtacgccgactcctttgtgatccggggcgatgaagtgagacagatcgcaccaggacagaccggaaagatcgcagactacaactataagctgcctgacgatttcacaggctgcgtgatcgcctggaatagcaacaatctggattccaaagtgggcggcaactacaattatctgtacaggctgttccgcaagtccaacctgaagccatttgagcgggacatctccaccagtatctaccaggccggctctacaccctgcaacggcgtggagggcttcaattgttattttcccctgcagtcttacggcttccagcctacaaatggcgtgggctatcagccataccgggtggtggtgctgtcttttgagctgctgcacgcaccagcaaccgtgtgcggccccaagaagagcacacatcatcaccaccaccaccaccactga

SEQ ID NO: 5883 - DNA, 735 bp, Artificial Sequence
  Description of Artificial Sequence: Synthetic polynucleotide
atgggcatcctgccaagcccaggaatgcccgccctgctgtctctggtgagcctgctgtccgtgctgctgatgggatgcgtggcagagacaggcacaaggttccctaacatcaccaatctgtgcccattcggcgaggtgtttaacgccacacgctttgcctccgtgtatgcctggaaccggaagagaatctctaattgcgtggccgactatagcgtgctgtacaatagcgcctccttctctacctttaagtgctatggcgtgagccccaccaagctgaacgatctgtgcttcacaaacgtgtacgccgactcctttgtgatccggggcgatgaagtgagacagatcgcaccaggacagaccggaaagatcgcagactacaactataagctgcctgacgatttcacaggctgcgtgatcgcctggaatagcaacaatctggattccaaagtgggcggcaactacaattatctgtacaggctgttccgcaagtccaacctgcaaccatttgagcgggacatctccaccgagatctaccaggccggctctacaccctgcaacggcgtggagggcttcaattgttattttcccctgcagtcttacggcttccagcctacaaatggcgtgggctatcagccataccgggtggtggtgctgtcttttgagctgctgcacgcaccagcaaccgtgtgcggccccaagaagagcacacatcatcaccaccaccaccaccactga

SEQ ID NO: 5884 - DNA, 735 bp, Artificial Sequence
  Description of Artificial Sequence: Synthetic polynucleotide
atgggcatcctgccaagcccaggaatgcccgccctgctgtctctggtgagcctgctgtccgtgctgctgatgggatgcgtggcagagacaggcacaaggttccctaacatcaccaatctgtgcccattcggcgaggtgtttaacgccacacgctttgcctccgtgtatgcctggaaccggaagagaatctctaattgcgtggccgactatagcgtgctgtacaatagcgcctccttctctacctttaagtgctatggcgtgagccccaccaagctgaacgatctgtgcttcacaaacgtgtacgccgactcctttgtgatccggggcgatgaagtgagacagatcgcaccaggacagaccggaaagatcgcagactacaactataagctgcctgacgatttcacaggctgcgtgatcgcctggaatagcaacaatctggattccaaagtgggcggcaactacaattatctgtacaggctgttccgcaagtccaacctgaagccatttgagcgggacatctccaccgagatctaccaggccggctctacaccctgcaacggcgtggagggcttcaattgttattttcccctgcagtcttacggcttccagcctacaaatggcgtgggctatcagccataccgggtggtggtgctgtcttttgagctgctgtacgcaccagcaaccgtgtgcggccccaagaagagcacacatcatcaccaccaccaccaccactga

SEQ ID NO: 5885 - DNA, 735 bp, Artificial Sequence
  Description of Artificial Sequence: Synthetic polynucleotide
atgggcatcctgccaagcccaggaatgcccgccctgctgtctctggtgagcctgctgtccgtgctgctgatgggatgcgtggcagagacaggcacaaggttccctaacatcaccaatctgtgcccattcggcgaggtgtttaacgccacacgctttgcctccgtgtatgcctggaaccggaagagaatctctaattgcgtggccgacatgagcgtgctgtacaatagcgcctccttctctacctttaagtgctatggcgtgagccccaccaagctgaacgatctgtgcttcacaaacgtgtacgccgactcctttgtgatccggggcgatgaagtgagacagatcgcaccaggacagaccggaaagatcgcagactacaactataagctgcctgacgatttcacaggctgcgtgatcgcctggaatagcaacaatctggattccaaagtgggcggcaactacaattatctgtacaggctgttccgcaagtccaacctgaagccatttgagcgggacatctccaccgagatctaccaggccggctctacaccctgcaacggcgtggagggcttcaattgttattttcccctgcagtcttacggcttccagcctacaaatggcgtgggctatcagccataccgggtggtggtgctgtcttttgagctgctgcacgcaccagcaaccgtgtgcggccccaagaagagcacacatcatcaccaccaccaccaccactga

SEQ ID NO: 5886 - DNA, 735 bp, Artificial Sequence
  Description of Artificial Sequence: Synthetic polynucleotide
atgggcatcctgccaagcccaggaatgcccgccctgctgtctctggtgagcctgctgtccgtgctgctgatgggatgcgtggcagagacaggcacaaggttccctaacatcaccaatctgtgcccattcggcgaggtgtttaacgccacacgctttgcctccgtgtatgcctggaaccggaagagagtctctaattgcgtggccgactatagcgtgctgtacaatagcgcctccttctctacctttaagtgctatggcgtgagccccaccaagctgaacgatctgtgcttcacaaacgtgtacgccgactcctttgtgatccggggcgatgaagtgagacagatcgcaccaggacagaccggaaagatcgcagactacaactataagctgcctgacgatttcacaggctgcgtgatcgcctggaatagcaacaatctggattccaaagtgggcggcaactacaattatctgtacaggctgttccgcaagtccaacctgaagccatttgagcgggacatctccaccgagatctaccaggccggctctacaccctgcaacggcgtggagggcttcaattgttattttcccctgcagtcttacggcttccagcctacaaatggcgtgggctatcagccataccgggtggtggtgctgtcttttgagctgctgcacgcaccagcaaccgtgtgcggccccaagaagagcacacatcatcaccaccaccaccaccactga

SEQ ID NO: 5887 - DNA, 735 bp, Artificial Sequence
  Description of Artificial Sequence: Synthetic polynucleotide
atgggcatcctgccaagcccaggaatgcccgccctgctgtctctggtgagcctgctgtccgtgctgctgatgggatgcgtggcagagacaggcacaaggttccctaacatcaccaatctgtgcccattcggcgaggtgtttaacgccacacgctttgcctccgtgtatgcctggaaccggaagagaatctctaattgcgtggccgactatagcgtgctgtacaatagcgcctccttctctacctttaagtgctatggcgtgagccccaccaagctgaacgatctgtgcttcacaaacgtgtacgccgactcctttgtgatccggggcgatgaagtgagacagatcgcaccaggacagaccggaaagatcgcagactacaactataagctgcctgacgatttcacaggctgcgtgatcgcctggaatagcaacaatctggattccaaagtgggcggcaactacaattatctgtacaggctgttccgcaagtccaacctgaagccatttcgacgggacatctccaccgagatctaccaggccggctctacaccctgcaacggcgtggagggcttcaattgttattttcccctgcagtcttacggcttccagcctacaaatggcgtgggctatcagccataccgggtggtggtgctgtcttttgagctgctgcacgcaccagcaaccgtgtgcggccccaagaagagcacacatcatcaccaccaccaccaccactga

SEQ ID NO: 5888 - DNA, 735 bp, Artificial Sequence
  Description of Artificial Sequence: Synthetic polynucleotide
atgggcatcctgccaagcccaggaatgcccgccctgctgtctctggtgagcctgctgtccgtgctgctgatgggatgcgtggcagagacaggcacaaggttccctaacatcaccaatctgtgcccattcggcgaggtgtttaacgccacacgctttgcctccgtgtatgcctggaaccggaagagaatctctaattgcgtggccgactatagcgtgctgtacaatagcgcctccttctctacctttaagtgctatggcgtgagccccaccaagctgaacgatctgtgcttcacaaacgtgtacgccgactcctttgtgatccggggcgatgaagtgagacagatcgcaccaggacagaccggaaagatcgcagactacaactataagctgcctgacgatttcacaggctgcgtgatcgcctggaatagcaacaatctggattccaaagtgggcggcaactacaattatctgtacaggctgttccgcaagtccaacctgaagccatttgagcgggacatctccaccgagatctaccaggccggctctacaccctgcaacggcgtggagggcttcaattgttattttcccctgcagtcttacggcttccagcctacaaatggcgtgggctatcagccataccgggtggtggtgctgtcttttgagctgactcacgcaccagcaaccgtgtgcggccccaagaagagcacacatcatcaccaccaccaccaccactga

SEQ ID NO: 5889 - DNA, 735 bp, Artificial Sequence
  Description of Artificial Sequence: Synthetic polynucleotide
atgggcatcctgccaagcccaggaatgcccgccctgctgtctctggtgagcctgctgtccgtgctgctgatgggatgcgtggcagagacaggcacaaggttccctaacatcaccaatctgtgcccattcggcgaggtgtttaacgccacacgctttgcctccgtgtatgcctggaaccggaagagaatctctaattgcgtggccgactatagcgtgctgtacaatagcgcctccttctctacctttaagtgctatggcgtgagccccaccaagctgaacgatctgtgcttcacaaacgtgtacgccgactcctttgtgatccggggcgatgaagtgagacagatcgcaccaggacagaccggaaagatcgcagactacaactataagctgcctgacgatttcacaggctgcgtgatcgcctggaatagcaacaatctggattccaaagtgggcggcaactacaattatctgtacaggctgttccgcaagtccaacctgaagccatttgagcaagacatctccaccgagatctaccaggccggctctacaccctgcaacggcgtggagggcttcaattgttattttcccctgcagtcttacggcttccagcctacaaatggcgtgggctatcagccataccgggtggtggtgctgtcttttgagctgctgcacgcaccagcaaccgtgtgcggccccaagaagagcacacatcatcaccaccaccaccaccactga

SEQ ID NO: 5890 - DNA, 735 bp, Artificial Sequence
  Description of Artificial Sequence: Synthetic polynucleotide
atgggcatcctgccaagcccaggaatgcccgccctgctgtctctggtgagcctgctgtccgtgctgctgatgggatgcgtggcagagacaggcacaaggttccctaacatcaccaatctgtgcccattcggcgaggtgtttaacgccacacgctttgcctccgtgtatgcctggaaccggaagagaatctctaattgcgtggccgactatcgagtgctgtacaatagcgcctccttctctacctttaagtgctatggcgtgagccccaccaagctgaacgatctgtgcttcacaaacgtgtacgccgactcctttgtgatccggggcgatgaagtgagacagatcgcaccaggacagaccggaaagatcgcagactacaactataagctgcctgacgatttcacaggctgcgtgatcgcctggaatagcaacaatctggattccaaagtgggcggcaactacaattatctgtacaggctgttccgcaagtccaacctgaagccatttgagcgggacatctccaccgagatctaccaggccggctctacaccctgcaacggcgtggagggcttcaattgttattttcccctgcagtcttacggcttccagcctacaaatggcgtgggctatcagccataccgggtggtggtgctgtcttttgagctgctgcacgcaccagcaaccgtgtgcggccccaagaagagcacacatcatcaccaccaccaccaccactga

SEQ ID NO: 5891 - DNA, 735 bp, Artificial Sequence
  Description of Artificial Sequence: Synthetic polynucleotide
atgggcatcctgccaagcccaggaatgcccgccctgctgtctctggtgagcctgctgtccgtgctgctgatgggatgcgtggcagagacaggcacaaggttccctaacatcaccaatctgtgcccattcggcgaggtgtttaacgccacacgctttgcctccgtgtatgcctggaaccggaagagaatctctaattgcgtggccgactatagcgtgctgtacaatagcgcctccttctctacctttaagtgctatggcgtgagccccaccaagctgaacgatctgtgcttcacaaacgtgtacgccgactcctttgtgatccggggcgatgaagtgagacagatcgcaccaggacagaccggaaagatcgcagactacaactataagctgcctgacgatttcacaggctgcgtgatcgcctggaatagcaacaatctggattccaaagtgggcggcaactacaattatctgtacaggctgttccgcaagtccaacctgaagccatttgagcggaatatctccaccgagatctaccaggccggctctacaccctgcaacggcgtggagggcttcaattgttattttcccctgcagtcttacggcttccagcctacaaatggcgtgggctatcagccataccgggtggtggtgctgtcttttgagctgctgcacgcaccagcaaccgtgtgcggccccaagaagagcacacatcatcaccaccaccaccaccactga

SEQ ID NO: 5892 - DNA, 735 bp, Artificial Sequence
  Description of Artificial Sequence: Synthetic polynucleotide
atgggcatcctgccaagcccaggaatgcccgccctgctgtctctggtgagcctgctgtccgtgctgctgatgggatgcgtggcagagacaggcacaaggttccctaacatcaccaatctgtgcccattcggcgaggtgtttaacgccacacgctttgcctccgtgtatgcctggaaccggaagagaatctctaattgcgtggccgactatagcgtgctgtacaatagcgcctccttctctacctttaagtgctatggcgtgagccccaccaagctgaacgatctgtgcttcacaaacgtgtacgccgactcctttgtgatccggggcgatgaagtgagacagatcgcaccaggacagaccggaaagatcgcagactacaactataagctgcctgacgatttcacaggctgcgtgatcgcctggaatagcaacaatctggattccaaagtgggcggcaactacaattatctgtacaggctgttccgcaagtccaacctgaagccatttgagcgggacatctccaccaaaatctaccaggccggctctacaccctgcaacggcgtggagggcttcaattgttattttcccctgcagtcttacggcttccagcctacaaatggcgtgggctatcagccataccgggtggtggtgctgtcttttgagctgctgcacgcaccagcaaccgtgtgcggccccaagaagagcacacatcatcaccaccaccaccaccactga

SEQ ID NO: 5893 - DNA, 735 bp, Artificial Sequence
  Description of Artificial Sequence: Synthetic polynucleotide
atgggcatcctgccaagcccaggaatgcccgccctgctgtctctggtgagcctgctgtccgtgctgctgatgggatgcgtggcagagacaggcacaaggttccctaacatcaccaatctgtgcccattcggcgaggtgtttaacgccacacgctttgcctccgtgtatgcctggaaccggaagagaatctctaattgcgtggccgactatagcgtgctgtacaatagcgcctccttctctacctttaagtgctatggcgtgagccccaccaagctgaacgatctgtgcttcacaaacgtgtacgccgactcctttgtgatccggggcgatgaagtgagacagatcgcaccaggacagaccggaaagatcgcagactacaactataagctgcctgacgatttcacaggctgcgtgatcgcctggaatagcaacaatctggattccaaagtgggcggcaactacaattatctgtacaggctgttccgcaagtccaacctgaagccatttgagcgggacatctccaccgagatgtaccaggccggctctacaccctgcaacggcgtggagggcttcaattgttattttcccctgcagtcttacggcttccagcctacaaatggcgtgggctatcagccataccgggtggtggtgctgtcttttgagctgctgcacgcaccagcaaccgtgtgcggccccaagaagagcacacatcatcaccaccaccaccaccactga

SEQ ID NO: 5894 - DNA, 735 bp, Artificial Sequence
  Description of Artificial Sequence: Synthetic polynucleotide
atgggcatcctgccaagcccaggaatgcccgccctgctgtctctggtgagcctgctgtccgtgctgctgatgggatgcgtggcagagacaggcacaaggttccctaacatcaccaatctgtgcccattcggcgaggtgtttaacgccacacgctttgcctccgtgtatgcctggaaccggaagagaatctctaattgcgtggccgactatagcgtgctgtacaatagcgcctccttctctacctttaagtgctatggcgtgagccccaccaagctgaacgatctgtgcttcacaaacgtgtacgccgactcctttgtgatccggggcgatgaagtgagacagatcgcaccaggacagaccggaaagatcgcagactacaactataagctgcctgacgatttcacaggctgcgtgatcgcctggaatagcaacaatctggattccaaagtgggcggcaactacaattatctgtacaggctgttccgcaagtccaacctgaagccatttgagcgggacatctccaccgagatctaccaggccggctctacaccctgcaacggcgtggagggcttcaattgttattttcccctgcagtcttacggcttccagcctacaaatggcgtgggctatcagccataccgggtggtggtgctgtcttttgagctgctgaatgcaccagcaaccgtgtgcggccccaagaagagcacacatcatcaccaccaccaccaccactga

SEQ ID NO: 5895 - DNA, 735 bp, Artificial Sequence
  Description of Artificial Sequence: Synthetic polynucleotide
atgggcatcctgccaagcccaggaatgcccgccctgctgtctctggtgagcctgctgtccgtgctgctgatgggatgcgtggcagagacaggcacaaggttccctaacatcaccaatctgtgcccattcggcgaggtgtttaacgccacacgctttgcctccgtgtatgcctggaaccggaagagaatctctaattgcgtggccgactatagcgtgctgtacaatagcgcctccttctctacctttaagtgctatggcgtgagccccaccaagctgaacgatctgtgcttcacaaacgtgtacgccgactcctttgtgatccggggcgatgaagtgagacagatcgcaccaggacagaccggaaagatcgcagactacaactataagctgcctgacgatttcacaggctgcgtgatcgcctggaatagcaacaatctggattccaaagtgggcggcaactacaattatctgtacaggctgttccgcaagtccaacctgaagccatttgagcgggacatctccaccgagatctaccaggccggctctacaccctgcaacggcgtggagggcttcaattgttattttcccctgcagtcttacactttccagcctacaaatggcgtgggctatcagccataccgggtggtggtgctgtcttttgagctgctgcacgcaccagcaaccgtgtgcggccccaagaagagcacacatcatcaccaccaccaccaccactga

SEQ ID NO: 5896 - DNA, 735 bp, Artificial Sequence
  Description of Artificial Sequence: Synthetic polynucleotide
atgggcatcctgccaagcccaggaatgcccgccctgctgtctctggtgagcctgctgtccgtgctgctgatgggatgcgtggcagagacaggcacaaggttccctaacatcaccaatctgtgcccattcggcgaggtgtttaacgccacacgctttgcctccgtgtatgcctggaaccggaagagaatctctaattgcgtggccgactatagcgtgctgtacaatagcgcctccttctctacctttaagtgctatggcgtgagccccaccaagctgaacgatctgtgcttcacaaacgtgtacgccgactcctttgtgatccggggcgatgaagtgagacagatcgcaccaggacagaccggaaagatcgcagactacaactataagctgcctgacgatttcacaggctgcgtgatcgcctggaatagcaacaatctggattccaaagtgggcggcaactacaattatctgtacaggctgttccgcaagtccaaccgaaagccatttgagcgggacatctccaccgagatctaccaggccggctctacaccctgcaacggcgtggagggcttcaattgttattttcccctgcagtcttacggcttccagcctacaaatggcgtgggctatcagccataccgggtggtggtgctgtcttttgagctgctgcacgcaccagcaaccgtgtgcggccccaagaagagcacacatcatcaccaccaccaccaccactga

SEQ ID NO: 5897 - DNA, 735 bp, Artificial Sequence
  Description of Artificial Sequence: Synthetic polynucleotide
atgggcatcctgccaagcccaggaatgcccgccctgctgtctctggtgagcctgctgtccgtgctgctgatgggatgcgtggcagagacaggcacaaggttccctaacatcaccaatctgtgcccattcggcgaggtgtttaacgccacacgctttgcctccgtgtatgcctggaaccggaagagaatctctaattgcgtggccgactatagcgtgctgtacaatagcgcctccttctctacctttaagtgctatggcgtgagccccaccaagctgaacgatctgtgcttcacaaacgtgtacgccgactcctttgtgatccggggcgatgaagtgagacagatcgcaccaggacagaccggaaagatcgcagactacaactataagctgcctgacgatttcacaggctgcgtgatcgcctggaatagcaacaatctggattccaaagtgggcggcaactacaattatctgtacaggctgttccgcaagtccaacctgaagccatttgagcgggacatctccaccgagatctaccaggccggctctacaccctgcaacggcgtggagggcttcaattgttattttcccctgcagtcttacggcttccagcctacaaatggcgtgggctatcagccataccgggtggtggtgctgtcttttgagctgctgcgtgcaccagcaaccgtgtgcggccccaagaagagcacacatcatcaccaccaccaccaccactga

SEQ ID NO: 5898 - DNA, 735 bp, Artificial Sequence
  Description of Artificial Sequence: Synthetic polynucleotide
atgggcatcctgccaagcccaggaatgcccgccctgctgtctctggtgagcctgctgtccgtgctgctgatgggatgcgtggcagagacaggcacaaggttccctaacatcaccaatctgtgcccattcggcgaggtgtttaacgccacacgctttgcctccgtgtatgcctggaaccggaagagaatctctaattgcgtggccgactatagcgtgctgtacaatagcgcctccttctctacctttaagtgctatggcgtgagccccaccaagctgaacgatctgtgcttcacaaacgtgtacgccgactcctttgtgatccggggcgatgaagtgagacagatcgcaccaggacagaccggaaagatcgcagactacaactataagctgcctgacgatttcacaggctgcgtgatcgcctggaatagcaacaatctggattccaaagtgggcggcaactacaattatctgtacaggctgttccgcaagtccaacctgaagccatttgagcgggacatctccctcgagatctaccaggccggctctacaccctgcaacggcgtggagggcttcaattgttattttcccctgcagtcttacggcttccagcctacaaatggcgtgggctatcagccataccgggtggtggtgctgtcttttgagctgctgcacgcaccagcaaccgtgtgcggccccaagaagagcacacatcatcaccaccaccaccaccactga

SEQ ID NO: 5899 - DNA, 735 bp, Artificial Sequence
  Description of Artificial Sequence: Synthetic polynucleotide
atgggcatcctgccaagcccaggaatgcccgccctgctgtctctggtgagcctgctgtccgtgctgctgatgggatgcgtggcagagacaggcacaaggttccctaacatcaccaatctgtgcccattcggcgaggtgtttaacgccacacgctttgcctccgtgtatgcctggaaccggaagagaatctctaattgcgtggccgactatagcgtgctgtacaatagcgcctccttctctacctttaagtgctatggcgtgagccccaccaagctgaacgatctgtgcttcacaaacgtgtacgccgactcctttgtgatccggggcgatgaagtgagacagatcgcaccaggacagaccggaaagatcgcagactacaactataagctgcctgacgatttcacaggctgcgtgatcgcctggaatagcaacaatctggattccaaagtgggcggcaactacaattatctgtacaggctgttccgcaagtccaacctgaagccatttgagcgggacatctcccacgagatctaccaggccggctctacaccctgcaacggcgtggagggcttcaattgttattttcccctgcagtcttacggcttccagcctacaaatggcgtgggctatcagccataccgggtggtggtgctgtcttttgagctgctgcacgcaccagcaaccgtgtgcggccccaagaagagcacacatcatcaccaccaccaccaccactga

SEQ ID NO: 5900 - DNA, 735 bp, Artificial Sequence
  Description of Artificial Sequence: Synthetic polynucleotide
atgggcatcctgccaagcccaggaatgcccgccctgctgtctctggtgagcctgctgtccgtgctgctgatgggatgcgtggcagagacaggcacaaggttccctaacatcaccaatctgtgcccattcggcgaggtgtttaacgccacacgctttgcctccgtgtatgcctggaaccggaagagaatctctaattgcgtggccgactatagcgtgctgtacaatagcgcctccttctctacctttaagtgctatggcgtgagccccaccaagctgaacgatctgtgcttcacaaacgtgtacgccgactcctttgtgatccggggcgatgaagtgagacagatcgcaccaggacagaccggaaagatcgcagactacaactataagctgcctgacgatttcacaggctgcgtgatcgcctggaatagcaacaatctggattccaaagtgggcggcaactacaattatctgtacaggctgttccgcaagtccaacctgaagccatttaaacgggacatctccaccgagatctaccaggccggctctacaccctgcaacggcgtggagggcttcaattgttattttcccctgcagtcttacggcttccagcctacaaatggcgtgggctatcagccataccgggtggtggtgctgtcttttgagctgctgcacgcaccagcaaccgtgtgcggccccaagaagagcacacatcatcaccaccaccaccaccactga

SEQ ID NO: 5901 - DNA, 735 bp, Artificial Sequence
  Description of Artificial Sequence: Synthetic polynucleotide
atgggcatcctgccaagcccaggaatgcccgccctgctgtctctggtgagcctgctgtccgtgctgctgatgggatgcgtggcagagacaggcacaaggttccctaacatcaccaatctgtgcccattcggcgaggtgtttaacgccacacgctttgcctccgtgtatgcctggaaccggaagagaatctctaattgcgtggccgactatagcgtgctgtacaatagcgcctccttctctacctttaagtgctatggcgtgagccccaccaagctgaacgatctgtgcttcacaaacgtgtacgccgactcctttgtgatccggggcgatgaagtgagacagatcgcaccaggacagaccggaaagatcgcagactacaactataagctgcctgacgatttcacaggctgcgtgatcgcctggaatagcaacaatctggattccaaagtgggcggcaactacaattatctgtacaggctgttccgcaagtccaacctgaagccatttgagcgggacatctccaccgagatctaccaggccggctctacaccctgcaacggcgtggagggcttcaattgttattttcccctgcagtcttacggcttccagcctacaaatggcgtgggctatcagccataccgggtggtggtgctgacttttgagctgctgcacgcaccagcaaccgtgtgcggccccaagaagagcacacatcatcaccaccaccaccaccactga

SEQ ID NO: 5902 - DNA, 735 bp, Artificial Sequence
  Description of Artificial Sequence: Synthetic polynucleotide
atgggcatcctgccaagcccaggaatgcccgccctgctgtctctggtgagcctgctgtccgtgctgctgatgggatgcgtggcagagacaggcacaaggttccctaacatcaccaatctgtgcccattcggcgaggtgtttaacgccacacgctttgcctccgtgtatgcctggaaccggaagagaatctctaattgcgtggccgactatagcgtgctgtacaatagcgcctccttctctacctttaagtgctatggcgtgagccccaccaagctgaacgatctgtgcttcacaaacgtgtacgccgactcctttgtgatccggggcgatgaagtgagacagatcgcaccaggacagaccggaaagatcgcagactacaactataagctgcctgacgatttcacaggctgcgtgatcgcctggaatagcaacaatctggattccaaagtgggcggcaactacaattatctgtacaggctgttccgcaagtccaacctgaagccatttgagcgggacatctccaccgagatctaccaggccggctctacaccctgcaacggcgtggagggcttcaattgttattttgcgctgcagtcttacggcttccagcctacaaatggcgtgggctatcagccataccgggtggtggtgctgtcttttgagctgctgcacgcaccagcaaccgtgtgcggccccaagaagagcacacatcatcaccaccaccaccaccactga

SEQ ID NO: 5903 - DNA, 735 bp, Artificial Sequence
  Description of Artificial Sequence: Synthetic polynucleotide
atgggcatcctgccaagcccaggaatgcccgccctgctgtctctggtgagcctgctgtccgtgctgctgatgggatgcgtggcagagacaggcacaaggttccctaacatcaccaatctgtgcccattcggcgaggtgtttaacgccacacgctttgcctccgtgtatgcctggaaccggaagagaatctctaattgcgtggccgactatagcgtgctgtacaatagcgcctccttctctacctttaagtgctatggcgtgagccccaccaagctgaacgatctgtgcttcacaaacgtgtacgccgactcctttgtgatccggggcgatgaagtgagacagatcgcaccaggacagaccggaaagatcgcagactacaactataagctgcctgacgatttcacaggctgcgtgatcgcctggaatagcaacaatctggattccaaagtgggcggcaactacaattatctgtacaggctgttccgcaagtccaacctggcgccatttgagcgggacatctccaccgagatctaccaggccggctctacaccctgcaacggcgtggagggcttcaattgttattttcccctgcagtcttacggcttccagcctacaaatggcgtgggctatcagccataccgggtggtggtgctgtcttttgagctgctgcacgcaccagcaaccgtgtgcggccccaagaagagcacacatcatcaccaccaccaccaccactga

SEQ ID NO: 5904 - DNA, 735 bp, Artificial Sequence
  Description of Artificial Sequence: Synthetic polynucleotide
atgggcatcctgccaagcccaggaatgcccgccctgctgtctctggtgagcctgctgtccgtgctgctgatgggatgcgtggcagagacaggcacaaggttccctaacatcaccaatctgtgcccattcggcgaggtgtttaacgccacacgctttgcctccgtgtatgcctggaaccggaagagaatctctaattgcgtggccgactatagcgtgctgtacaatagcgcctccttctctacctttaagtgctatggcgtgagccccaccaagctgaacgatctgtgcttcacaaacgtgtacgccgactcctttgtgatccggggcgatgaagtgagacagatcgcaccaggacagaccggaaagatcgcagactacaactataagctgcctgacgatttcacaggctgcgtgatcgcctggaatagcaacaatctggattccaaagtgggcggcaactacaattatctgtacaggctgttccgcaagtccaacctgaagccatttgagcgggacatctccaccgagatctaccaggccggctctacaccctgcaacggcgtggagggcttcaattgttattttcccctgcagtcttacggcttccagcctacaaatggcgtgggctatcagccataccgggtggtggtgctgtcttttgagctgctgaaagcaccagcaaccgtgtgcggccccaagaagagcacacatcatcaccaccaccaccaccactga

SEQ ID NO: 5905 - DNA, 735 bp, Artificial Sequence
  Description of Artificial Sequence: Synthetic polynucleotide
atgggcatcctgccaagcccaggaatgcccgccctgctgtctctggtgagcctgctgtccgtgctgctgatgggatgcgtggcagagacaggcacaaggttccctaacatcaccaatctgtgcccattcggcgaggtgtttaacgccacacgctttgcctccgtgtatgcctggaaccggaagagaatctctaattgcgtggccgactatagcgtgctgtacaatagcgcctccttctctacctttaagtgctatggcgtgagccccaccaagctgaacgatctgtgcttcacaaacgtgtacgccgactcctttgtgatccggggcgatgaagtgagacagatcgcaccaggacagaccggaaagatcgcagactacaactataagctgcctgacgatttcacaggctgcgtgatcgcctggaatagcaacaatctggattccaaagtgggcggcaactacaattatctgtacaggctgttccgcaagtccaacctgaagccatttgagcgggacatctccaccgagatctaccaggccggctctacaccctgcaacggcgtggagggcttcaattgttattttcccctgcagtcttacggcttccagcctacaaatggcgtgggctatcagccataccgggtggtggtgctgtcttttgagctgctgttagcaccagcaaccgtgtgcggccccaagaagagcacacatcatcaccaccaccaccaccactga

SEQ ID NO: 5906 - DNA, 735 bp, Artificial Sequence
  Description of Artificial Sequence: Synthetic polynucleotide
atgggcatcctgccaagcccaggaatgcccgccctgctgtctctggtgagcctgctgtccgtgctgctgatgggatgcgtggcagagacaggcacaaggttccctaacatcaccaatctgtgcccattcggcgaggtgtttaacgccacacgctttgcctccgtgtatgcctggaaccggaagagaatctctaattgcgtggccgactatagcgtgctgtacaatagcgcctccttctctacctttaagtgctatggcgtgagccccaccaagctgaacgatctgtgcttcacaaacgtgtacgccgactcctttgtgatccggggcgatgaagtgagacagatcgcaccaggacagaccggaaagatcgcagactacaactataagctgcctgacgatttcacaggctgcgtgatcgcctggaatagcaacaatctggattccaaagtgggcggcaactacaattatctgtacaggctgttccgcaagtccaacctgaagccatttgagcgggacatctccaccgagatctaccaggccggctctacaccctgcaacggcgtggagggcttcaattgttattttcccctgcagtcttacggcttccagcctacaaatggcgtgggctatcagccataccgggtggtggtgctgtcttttgagctgctggatgcaccagcaaccgtgtgcggccccaagaagagcacacatcatcaccaccaccaccaccactga

SEQ ID NO: 5907 - DNA, 735 bp, Artificial Sequence
  Description of Artificial Sequence: Synthetic polynucleotide
atgggcatcctgccaagcccaggaatgcccgccctgctgtctctggtgagcctgctgtccgtgctgctgatgggatgcgtggcagagacaggcacaaggttccctaacatcaccaatctgtgcccattcggcgaggtgtttaacgccacacgctttgcctccgtgtatgcctggaaccggaagagaatctctaattgcgtggccgactatagcgtgctgtacgcaagcgcctccttctctacctttaagtgctatggcgtgagccccaccaagctgaacgatctgtgcttcacaaacgtgtacgccgactcctttgtgatccggggcgatgaagtgagacagatcgcaccaggacagaccggaaagatcgcagactacaactataagctgcctgacgatttcacaggctgcgtgatcgcctggaatagcaacaatctggattccaaagtgggcggcaactacaattatctgtacaggctgttccgcaagtccaacctgaagccatttgagcgggacatctccaccgagatctaccaggccggctctacaccctgcaacggcgtggagggcttcaattgttattttcccctgcagtcttacggcttccagcctacaaatggcgtgggctatcagccataccgggtggtggtgctgtcttttgagctgctgcacgcaccagcaaccgtgtgcggccccaagaagagcacacatcatcaccaccaccaccaccactga

SEQ ID NO: 5908 - DNA, 735 bp, Artificial Sequence
  Description of Artificial Sequence: Synthetic polynucleotide
atgggcatcctgccaagcccaggaatgcccgccctgctgtctctggtgagcctgctgtccgtgctgctgatgggatgcgtggcagagacaggcacaaggttccctaacatcaccaatctgtgcccattcggcgaggtgtttaacgccacacgctttgcctccgtgtatgcctggaaccggaagagaatctctaattgcgtggccgactatagcgtgctgtacaatagcgcctccttctctacctttaagtgctatggcgtgagccccaccaagctgaacgatctgtgcttcacaaacgtgtacgccgaccggtttgtgatccggggcgatgaagtgagacagatcgcaccaggacagaccggaaagatcgcagactacaactataagctgcctgacgatttcacaggctgcgtgatcgcctggaatagcaacaatctggattccaaagtgggcggcaactacaattatctgtacaggctgttccgcaagtccaacctgaagccatttgagcgggacatctccaccgagatctaccaggccggctctacaccctgcaacggcgtggagggcttcaattgttattttcccctgcagtcttacggcttccagcctacaaatggcgtgggctatcagccataccgggtggtggtgctgtcttttgagctgctgcacgcaccagcaaccgtgtgcggccccaagaagagcacacatcatcaccaccaccaccaccactga

SEQ ID NO: 5909 - DNA, 735 bp, Artificial Sequence
  Description of Artificial Sequence: Synthetic polynucleotide
atgggcatcctgccaagcccaggaatgcccgccctgctgtctctggtgagcctgctgtccgtgctgctgatgggatgcgtggcagagacaggcacaaggttccctaacatcaccaatctgtgcccattcggcgaggtgtttaacgccacacgctttgcctccgtgtatgcctggaaccggaagagaatctctaattgcgtggccgactatagcgtgctgtacaatagcgcctccttctctacctttaagtgctatggcgtgagccccaccaagctgaacgatctgtgcttcacaaacgtgtacgccgactcctttgtgatccggggcgatgaagtgagacagatcgcaccaggacagaccggaaagatcgcagactacaactataagctgcctgacgatttcacaggctgcgtgatcgcctggaatagcaacaatctggatgcgaaagtgggcggcaactacaattatctgtacaggctgttccgcaagtccaacctgaagccatttgagcgggacatctccaccgagatctaccaggccggctctacaccctgcaacggcgtggagggcttcaattgttattttcccctgcagtcttacggcttccagcctacaaatggcgtgggctatcagccataccgggtggtggtgctgtcttttgagctgctgcacgcaccagcaaccgtgtgcggccccaagaagagcacacatcatcaccaccaccaccaccactga

SEQ ID NO: 5910 - DNA, 735 bp, Artificial Sequence
  Description of Artificial Sequence: Synthetic polynucleotide
atgggcatcctgccaagcccaggaatgcccgccctgctgtctctggtgagcctgctgtccgtgctgctgatgggatgcgtggcagagacaggcacaaggttccctaacatcaccaatctgtgcccattcggcgaggtgtttaacgccacacgctttgcctccgtgtatgcctggaaccggaagagaatctctaattgcgtggccgactatagcgtgctgtacaatagcgcctccttctctacctttaagtgctatggcgtgagccccaccaagctgaacgatctgtgcttcacaaacgtgtacgccgactcctttgtgatccggggcgatgaagtgagacagatcgcaccaggacagaccggaaagatcgcagactacaactataagctgcctgacgatttcacaggctgcgtgatcgcctggaatagcaacaatctggattccaaagtgggcggcaactacaattatctgtacaggctgttccgcaagtccaacctgaagccatttgagcgggacatctccaccaatatctaccaggccggctctacaccctgcaacggcgtggagggcttcaattgttattttcccctgcagtcttacggcttccagcctacaaatggcgtgggctatcagccataccgggtggtggtgctgtcttttgagctgctgcacgcaccagcaaccgtgtgcggccccaagaagagcacacatcatcaccaccaccaccaccactga

SEQ ID NO: 5911 - DNA, 735 bp, Artificial Sequence
  Description of Artificial Sequence: Synthetic polynucleotide
atgggcatcctgccaagcccaggaatgcccgccctgctgtctctggtgagcctgctgtccgtgctgctgatgggatgcgtggcagagacaggcacaaggttccctaacatcaccaatctgtgcccattcggcgaggtgtttaacgccacacgctttgcctccgtgtatgcctggaaccggaagagaatctctaattgcgtggccgactatagcgtgctgtacaatagcgcctccttctctacctttaagtgctatggcgtgagccccaccaagctgaacgatctgtgcttcacaaacgtgtacgccgactcctttgtgatccggggcgatgaagtgagacagatcgcaccaggacagaccggaaagatcgcagactacaactataagctgcctgacgatttcacaggctgcgtgatcgcctggaatagcaacaatctggattccaaagtgggcggcaactacaattatctgtacaggctgttccgcaagtccaacctgaagccatttgagcgggacatctccaccgagatctaccaggccggctctacaccctgcaacggcgtggagggcttcaattgttattttcccctgcagtcttacggcttccagcctacaaatggcgtgggctatcagccataccgggtggtggtgctggtctttgagctgctgcacgcaccagcaaccgtgtgcggccccaagaagagcacacatcatcaccaccaccaccaccactga

SEQ ID NO: 5912 - DNA, 735 bp, Artificial Sequence
  Description of Artificial Sequence: Synthetic polynucleotide
atgggcatcctgccaagcccaggaatgcccgccctgctgtctctggtgagcctgctgtccgtgctgctgatgggatgcgtggcagagacaggcacaaggttccctaacatcaccaatctgtgcccattcggcgaggtgtttaacgccacacgctttgcctccgtgtatgcctggaaccggaagagaatctctaattgcgtggccgactatagcgtgctgtacaatagcgcctccttctctacctttaagtgctatggcgtgagccccaccaagctgaacgatctgtgcttcacaaacgtgtacgccgactcctttgtgatccggggcgatgaagtgagacagatcgcaccaggacagaccggaaagatccatgactacaactataagctgcctgacgatttcacaggctgcgtgatcgcctggaatagcaacaatctggattccaaagtgggcggcaactacaattatctgtacaggctgttccgcaagtccaacctgaagccatttgagcgggacatctccaccgagatctaccaggccggctctacaccctgcaacggcgtggagggcttcaattgttattttcccctgcagtcttacggcttccagcctacaaatggcgtgggctatcagccataccgggtggtggtgctgtcttttgagctgctgcacgcaccagcaaccgtgtgcggccccaagaagagcacacatcatcaccaccaccaccaccactga

SEQ ID NO: 5913 - DNA, 735 bp, Artificial Sequence
  Description of Artificial Sequence: Synthetic polynucleotide
atgggcatcctgccaagcccaggaatgcccgccctgctgtctctggtgagcctgctgtccgtgctgctgatgggatgcgtggcagagacaggcacaaggttccctaacatcaccaatctgtgcccattcggcgaggtgtttaacgccacacgctttgcctccgtgtatgcctggaaccggaagagaatctctaattgcgtggccgactatagcgtgctgtacaatagcgcctccttctctacctttaagtgctatggcgtgagccccaccaagctgaacgatctgtgcttcacaaacgtgtacgccgactcctttgtgatccggggcgatgaagtgagacagatcgcaccaggacagaccggaaagatcgcagactacaactataagctgcctgacgatttcacaggctgcgtgatcgcctggaatagcaacaatctggattccaaagtgggcggcaactacaattatctgtacaggctgttccgcaagtccaacctggacccatttgagcgggacatctccaccgagatctaccaggccggctctacaccctgcaacggcgtggagggcttcaattgttattttcccctgcagtcttacggcttccagcctacaaatggcgtgggctatcagccataccgggtggtggtgctgtcttttgagctgctgcacgcaccagcaaccgtgtgcggccccaagaagagcacacatcatcaccaccaccaccaccactga

SEQ ID NO: 5914 - DNA, 735 bp, Artificial Sequence
  Description of Artificial Sequence: Synthetic polynucleotide
atgggcatcctgccaagcccaggaatgcccgccctgctgtctctggtgagcctgctgtccgtgctgctgatgggatgcgtggcagagacaggcacaaggttccctaacatcaccaatctgtgcccattcggcgaggtgtttaacgccacacgctttgcctccgtgtatgcctggaaccggaagagaatctctaattgcgtggccgactatagcgtgctgtacaatagcgcctccttctctacctttaagtgctatggcgtgagccccaccaagctgaacgatctgtgcttcacaaacgtgtacgccgactcctttgtgatccggggcgatgaagtgagacagatcgcaccaggacagaccggaaagatcgcagactacaactataagctgcctgacgatttcacaggctgcgtgatcgcctggaatagcaacaatctggattccaaagtgggcggcaactacaattatctgtacaggctgttccgcaagtccaacctgaagccatttgagcgggacatctccaatgagatctaccaggccggctctacaccctgcaacggcgtggagggcttcaattgttattttcccctgcagtcttacggcttccagcctacaaatggcgtgggctatcagccataccgggtggtggtgctgtcttttgagctgctgcacgcaccagcaaccgtgtgcggccccaagaagagcacacatcatcaccaccaccaccaccactga

SEQ ID NO: 5915 - DNA, 735 bp, Artificial Sequence
  Description of Artificial Sequence: Synthetic polynucleotide
atgggcatcctgccaagcccaggaatgcccgccctgctgtctctggtgagcctgctgtccgtgctgctgatgggatgcgtggcagagacaggcacaaggttccctaacatcaccaatctgtgcccattcggcgaggtgtttaacgccacacgctttgcctccgtgtatgcctggaaccggaagagaatctctaattgcgtggccgactatagcgtgctgtacaatagcgcctccttctctacctttaagtgctatggcgtgagccccaccaagctgaacgatctgtgcttcacaaacgtgtacgccgactcctttgtgatccggggcgatgaagtgagacagatcgcaccaggacagaccggaaagatcgcagactacaactataagctgcctgacgatttcacaggctgcgtgatcgcctggaatagcaacaatctggattccaaagtgggcggcaactacaattatctgtacaggctgttccgcaagtccaacctgaagccatttgagcgggacatctccaccgagatctaccaggccggctctacaccctgcaacggcgtggagggcttcaattcatattttcccctgcagtcttacggcttccagcctacaaatggcgtgggctatcagccataccgggtggtggtgctgtcttttgagctgctgcacgcaccagcaaccgtgtgcggccccaagaagagcacacatcatcaccaccaccaccaccactga

SEQ ID NO: 5916 - DNA, 735 bp, Artificial Sequence
  Description of Artificial Sequence: Synthetic polynucleotide
atgggcatcctgccaagcccaggaatgcccgccctgctgtctctggtgagcctgctgtccgtgctgctgatgggatgcgtggcagagacaggcacaaggttccctaacatcaccaatctgtgcccattcggcgaggtgtttaacgccacacgctttgcctccgtgtatgcctggaaccggaagagaatctctaattgcgtggccgactatagcgtgctgtaccttagcgcctccttctctacctttaagtgctatggcgtgagccccaccaagctgaacgatctgtgcttcacaaacgtgtacgccgactcctttgtgatccggggcgatgaagtgagacagatcgcaccaggacagaccggaaagatcgcagactacaactataagctgcctgacgatttcacaggctgcgtgatcgcctggaatagcaacaatctggattccaaagtgggcggcaactacaattatctgtacaggctgttccgcaagtccaacctgaagccatttgagcgggacatctccaccgagatctaccaggccggctctacaccctgcaacggcgtggagggcttcaattgttattttcccctgcagtcttacggcttccagcctacaaatggcgtgggctatcagccataccgggtggtggtgctgtcttttgagctgctgcacgcaccagcaaccgtgtgcggccccaagaagagcacacatcatcaccaccaccaccaccactga

SEQ ID NO: 5917 - DNA, 735 bp, Artificial Sequence
  Description of Artificial Sequence: Synthetic polynucleotide
atgggcatcctgccaagcccaggaatgcccgccctgctgtctctggtgagcctgctgtccgtgctgctgatgggatgcgtggcagagacaggcacaaggttccctaacatcaccaatctgtgcccattcggcgaggtgtttaacgccacacgctttgcctccgtgtatgcctggaaccggaagagaatctctaattgcgtggccgactatagcgtgctgtacaatagcgcctccttctctacctttaagtgctatggcgtgagccccaccaagctgaacgatctgtgcttcacaaacgtgtacgccgactcctttgtgatccggggcgatgaagtgagacagatcgcaccaggacagaccggaaagatcgcagactacaactataagctgcctgacgatttcacaggctgcgtgatcgcctggaatagcaacaatctggattccaaagtgggcggcaactacaattatctgtacaggctgttccgcaagtccaacctgaagccatttgagcgggacatctccaccgagatctaccaggccggctctacaccctgcaacggcgtggagggcttcaattgttattttcccctgcagtcttacggcttccagcctacaaatggcgtgggctatcagccataccgggtggtggtgctggaatttgagctgctgcacgcaccagcaaccgtgtgcggccccaagaagagcacacatcatcaccaccaccaccaccactga

SEQ ID NO: 5918 - DNA, 735 bp, Artificial Sequence
  Description of Artificial Sequence: Synthetic polynucleotide
atgggcatcctgccaagcccaggaatgcccgccctgctgtctctggtgagcctgctgtccgtgctgctgatgggatgcgtggcagagacaggcacaaggttccctaacatcaccaatctgtgcccattcggcgaggtgtttaacgccacacgctttgcctccgtgtatgcctggaaccggaagagaatctctaattgcgtggccgactatagcgtgctgtacaatagcgcctccttctctacctttaagtgctatggcgtgagccccaccaagctgaacgatctgtgcttcacaaacgtgtacgccgactcctttgtgatccggggcgatgaagtgagacagatcgcaccaggacagaccggaaagatcgcagactacaactataagctgcctgacgatttcacaggctgcgtgatcgcctggaatagcaacaatctggattccaaagtgggcggcaactacaattatctgtacaggctgttccgcaagtccaacctgaagccatttgagcgggacatctccaccgagtgttaccaggccggctctacaccctgcaacggcgtggagggcttcaattgttattttcccctgcagtcttacggcttccagcctacaaatggcgtgggctatcagccataccgggtggtggtgctgtcttttgagctgctgcacgcaccagcaaccgtgtgcggccccaagaagagcacacatcatcaccaccaccaccaccactga

SEQ ID NO: 5919 - DNA, 735 bp, Artificial Sequence
  Description of Artificial Sequence: Synthetic polynucleotide
atgggcatcctgccaagcccaggaatgcccgccctgctgtctctggtgagcctgctgtccgtgctgctgatgggatgcgtggcagagacaggcacaaggttccctaacatcaccaatctgtgcccattcggcgaggtgtttaacgccacacgctttgcctccgtgtatgcctggaaccggaagagaatctctaattgcgtggccgactatagcgtgctgtaccaaagcgcctccttctctacctttaagtgctatggcgtgagccccaccaagctgaacgatctgtgcttcacaaacgtgtacgccgactcctttgtgatccggggcgatgaagtgagacagatcgcaccaggacagaccggaaagatcgcagactacaactataagctgcctgacgatttcacaggctgcgtgatcgcctggaatagcaacaatctggattccaaagtgggcggcaactacaattatctgtacaggctgttccgcaagtccaacctgaagccatttgagcgggacatctccaccgagatctaccaggccggctctacaccctgcaacggcgtggagggcttcaattgttattttcccctgcagtcttacggcttccagcctacaaatggcgtgggctatcagccataccgggtggtggtgctgtcttttgagctgctgcacgcaccagcaaccgtgtgcggccccaagaagagcacacatcatcaccaccaccaccaccactga

SEQ ID NO: 5920 - DNA, 735 bp, Artificial Sequence
  Description of Artificial Sequence: Synthetic polynucleotide
atgggcatcctgccaagcccaggaatgcccgccctgctgtctctggtgagcctgctgtccgtgctgctgatgggatgcgtggcagagacaggcacaaggttccctaacatcaccaatctgtgcccattcggcgaggtgtttaacgccacacgctttgcctccgtgtatgcctggaaccggaagagaatctctaattgcgtggccgactatagcgtgctgtacaatagcgcctccttctctacctttaagtgctatggcgtgagccccaccaagctgaacgatctgtgcttcacaaacgtgtacgccgactcctttgtgatccggggcgatgaagtgagacagatcgcaccaggacagaccggaaagatcgcagactacaactataagctgcctgacgatttcacaggctgcgtgatcgcctggaatagcaacaaactggattccaaagtgggcggcaactacaattatctgtacaggctgttccgcaagtccaacctgaagccatttgagcgggacatctccaccgagatctaccaggccggctctacaccctgcaacggcgtggagggcttcaattgttattttcccctgcagtcttacggcttccagcctacaaatggcgtgggctatcagccataccgggtggtggtgctgtcttttgagctgctgcacgcaccagcaaccgtgtgcggccccaagaagagcacacatcatcaccaccaccaccaccactga

SEQ ID NO: 5921 - DNA, 735 bp, Artificial Sequence
  Description of Artificial Sequence: Synthetic polynucleotide
atgggcatcctgccaagcccaggaatgcccgccctgctgtctctggtgagcctgctgtccgtgctgctgatgggatgcgtggcagagacaggcacaaggttccctaacatcaccaatctgtgcccattcggcgaggtgtttaacgccacacgctttgcctccgtgtatgcctggaaccggaagagaatctctaattgcgtggccgactatagcgtgctgtacaatagcgcctccttctctacctttaagtgctatggcgtgagccccaccaagctgaacgatctgtgcttcacaaacgtgtacgccgactcctttgtgatccggggcgatgaagtgagacagatcgcaccaggacagaccggaaagatcgcagactacaactataagctgcctgacgatttcacaggctgcgtgatcgcctggaatagcaacaatctggattccaaagtgggcggcaactacaattatctgtacaggctgttccgcaagtccaacctgaagccatttgagcgggacatctgtaccgagatctaccaggccggctctacaccctgcaacggcgtggagggcttcaattgttattttcccctgcagtcttacggcttccagcctacaaatggcgtgggctatcagccataccgggtggtggtgctgtcttttgagctgctgcacgcaccagcaaccgtgtgcggccccaagaagagcacacatcatcaccaccaccaccaccactga

SEQ ID NO: 5922 - DNA, 735 bp, Artificial Sequence
  Description of Artificial Sequence: Synthetic polynucleotide
atgggcatcctgccaagcccaggaatgcccgccctgctgtctctggtgagcctgctgtccgtgctgctgatgggatgcgtggcagagacaggcacaaggttccctaacatcaccaatctgtgcccattcggcgaggtgtttaacgccacacgctttgcctccgtgtatgcctggaaccggaagagaatctctaattgcgtggccgactatagcgtgctgtacaatagcgcctccttctctacctttaagtgctatggcgtgagccccaccaagctgaacgatctgtgcttcacaaacgtgtacgccgactcctttgtgatccggggcgatgaagtgagacagatcgcaccaggacagaccggaaagatcgcagactacaactataagctgcctgacgatttcacaggctgcgtgatcgcctggaatagcaacaatctggattccaaagtgggcggcaactacaattatctgtacaggctgttccgcaagtccaacctgaagccatttgagcgggacatctccaccgagatctaccaggccggctctacaccctgcaacgcggtggagggcttcaattgttattttcccctgcagtcttacggcttccagcctacaaatggcgtgggctatcagccataccgggtggtggtgctgtcttttgagctgctgcacgcaccagcaaccgtgtgcggccccaagaagagcacacatcatcaccaccaccaccaccactga

SEQ ID NO: 5923 - DNA, 735 bp, Artificial Sequence
  Description of Artificial Sequence: Synthetic polynucleotide
atgggcatcctgccaagcccaggaatgcccgccctgctgtctctggtgagcctgctgtccgtgctgctgatgggatgcgtggcagagacaggcacaaggttccctaacatcaccaatctgtgcccattcggcgaggtgtttaacgccacacgctttgcctccgtgtatgcctggaaccggaagagaatctctaattgcgtggccgactatagcgtgctgtacaatagcgcctccttctctacctttaagtgctatggcgtgagccccaccaagctgaacgatctgtgcttcacaaacgtgtacgccgactcctttgtgatccggggcgatgaagtgagacagatcgcaccaggacagaccggaaagatcgcagactacaactataagctgcctgacgatttcacaggctgcgtgatcgcctggaatagcaacaatctggattccaaagtgggcggcaactacaattatctgtacaggctgttccgcaagtccaacctgaagccatttgagcgggacatccaaaccgagatctaccaggccggctctacaccctgcaacggcgtggagggcttcaattgttattttcccctgcagtcttacggcttccagcctacaaatggcgtgggctatcagccataccgggtggtggtgctgtcttttgagctgctgcacgcaccagcaaccgtgtgcggccccaagaagagcacacatcatcaccaccaccaccaccactga

SEQ ID NO: 5924 - DNA, 735 bp, Artificial Sequence
  Description of Artificial Sequence: Synthetic polynucleotide
atgggcatcctgccaagcccaggaatgcccgccctgctgtctctggtgagcctgctgtccgtgctgctgatgggatgcgtggcagagacaggcacaaggttccctaacatcaccaatctgtgcccattcggcgaggtgtttaacgccacacgctttgcctccgtgtatgcctggaaccggaagagaatctctaattgcgtggccgactatagcgtgctgtacaatagcgcctccttctctacctttaagtgctatggcgtgagccccaccaagctgaacgatctgtgcttcacaaacgtgtacgccgactcctttgtgatccggggcgatgaagtgagacagatcgcaccaggacagaccggaaagatcgcagactacaactatcgactgcctgacgatttcacaggctgcgtgatcgcctggaatagcaacaatctggattccaaagtgggcggcaactacaattatctgtacaggctgttccgcaagtccaacctgaagccatttgagcgggacatctccaccgagatctaccaggccggctctacaccctgcaacggcgtggagggcttcaattgttattttcccctgcagtcttacggcttccagcctacaaatggcgtgggctatcagccataccgggtggtggtgctgtcttttgagctgctgcacgcaccagcaaccgtgtgcggccccaagaagagcacacatcatcaccaccaccaccaccactga

SEQ ID NO: 5925 - DNA, 735 bp, Artificial Sequence
  Description of Artificial Sequence: Synthetic polynucleotide
atgggcatcctgccaagcccaggaatgcccgccctgctgtctctggtgagcctgctgtccgtgctgctgatgggatgcgtggcagagacaggcacaaggttccctaacatcaccaatctgtgcccattcggcgaggtgtttaacgccacacgctttgcctccgtgtatgcctggaaccggaagagaatctctaattgcgtggccgactatagcgtgctgtacaatagcgcctccttctctacctttaagtgctatggcgtgagccccaccaagctgaacgatctgtgcttcacaaacgtgtacgccgactcctttgtgatccggggcgatgaagtgagacagatcgcaccaggacagaccggaaagatcgcagactacaactataagctgcctgacgatttcacaggctgcgtgatcgcctggaatagcaacaatctggattccaaagtgggcggcaactacaattatctgtacaggctgttccgcaagtccaacctgaagccatttgcgcgggacatctccaccgagatctaccaggccggctctacaccctgcaacggcgtggagggcttcaattgttattttcccctgcagtcttacggcttccagcctacaaatggcgtgggctatcagccataccgggtggtggtgctgtcttttgagctgctgcacgcaccagcaaccgtgtgcggccccaagaagagcacacatcatcaccaccaccaccaccactga

SEQ ID NO: 5926 - DNA, 735 bp, Artificial Sequence
  Description of Artificial Sequence: Synthetic polynucleotide
atgggcatcctgccaagcccaggaatgcccgccctgctgtctctggtgagcctgctgtccgtgctgctgatgggatgcgtggcagagacaggcacaaggttccctaacatcaccaatctgtgcccattcggcgaggtgtttaacgccacacgctttgcctccgtgtatgcctggaaccggaagagaatctctaattgcgtggccgactatagcgtgctgtacaatagcgcctccttctctacctttaagtgctatggcgtgagccccaccaagctgaacgatctgtgcttcacaaacgtgtacgccgactcctttgtgatccggggcgatgaagtgagacagatcgcaccaggacagaccggaaagatcgcagactacaactataagctgcctgacgatttcacaggctgcgtgatcgcctggaatagcaacaatctggattccaaagtgggcggcaactacaattatctgtacaggctgttccgcaagtccaacctgaagccatttgagcgggacatctccaccgagatctaccaggccggctctacaccctgcaacggcgtggagggcttcaattgttattttcccctgcagtcttacggcttccagcctacaaatggcgtgggctatcagccataccgggtggtggtgctgtcttttgagctgattcacgcaccagcaaccgtgtgcggccccaagaagagcacacatcatcaccaccaccaccaccactga

SEQ ID NO: 5927 - DNA, 735 bp, Artificial Sequence
  Description of Artificial Sequence: Synthetic polynucleotide
atgggcatcctgccaagcccaggaatgcccgccctgctgtctctggtgagcctgctgtccgtgctgctgatgggatgcgtggcagagacaggcacaaggttccctaacatcaccaatctgtgcccattcggcgaggtgtttaacgccacacgctttgcctccgtgtatgcctggaaccggaagagaatctctaattgcgtggccgactatagcgtgctgtacaatagcgcctccttctctacctttaagtgctatggcgtgagccccaccaagctgaacgatctgtgcttcacaaacgtgtacgccgactcctttgtgatccggggcgatgaagtgagacagatcgcaccaggacagaccggaaagatcgcagactacaactataagctgcctgacgatttcacaggctgcgtgatcgcctggaatagcaacaatctggattccaaagtgggcggcaactacaattatctgtacaggctgttccgcaagtccaacctgaagccatttgagcgggacatctccaccgagatctaccaggccggctctacaccctgcaacggcgtggagggcttcaattgttattttcccctgcagtcttacggcttccagcctacaaatggcgtgggctatcagccataccgggtggtgatactgtcttttgagctgctgcacgcaccagcaaccgtgtgcggccccaagaagagcacacatcatcaccaccaccaccaccactga

SEQ ID NO: 5928 - DNA, 735 bp, Artificial Sequence
  Description of Artificial Sequence: Synthetic polynucleotide
atgggcatcctgccaagcccaggaatgcccgccctgctgtctctggtgagcctgctgtccgtgctgctgatgggatgcgtggcagagacaggcacaaggttccctaacatcaccaatctgtgcccattcggcgaggtgtttaacgccacacgctttgcctccgtgtatgcctggaaccggaagagaatctctaattgcgtggccgactatagcgtgctgtacaatagcgcctccttctctacctttaagtgctatggcgtgagccccaccaagctgaacgatctgtgcttcacaaacgtgtacgccgactcctttgtgatccggggcgatgaagtgagacagatcgcaccaggacagaccggaaagatcgcagactacaactataagctgcctgacgatttcacaggctgcgtgatcgcctggaatagcaacaatctggattccaaagtgggcggcaactacaattatctgtacaggctgttccgcaagtccaacctgaagccatttgagcgggacatctccacccaaatctaccaggccggctctacaccctgcaacggcgtggagggcttcaattgttattttcccctgcagtcttacggcttccagcctacaaatggcgtgggctatcagccataccgggtggtggtgctgtcttttgagctgctgcacgcaccagcaaccgtgtgcggccccaagaagagcacacatcatcaccaccaccaccaccactga

SEQ ID NO: 5929 - DNA, 735 bp, Artificial Sequence
  Description of Artificial Sequence: Synthetic polynucleotide
atgggcatcctgccaagcccaggaatgcccgccctgctgtctctggtgagcctgctgtccgtgctgctgatgggatgcgtggcagagacaggcacaaggttccctaacatcaccaatctgtgcccattcggcgaggtgtttaacgccacacgctttgcctccgtgtatgcctggaaccggaagagaatctctaattgcgtggccgactatagcgtgctgtacaatagcgcctccttctctacctttaagtgctatggcgtgagccccaccaagctgaacgatctgtgcttcacaaacgtgtacgccgactcctttgtgatccggggcgatgaagtgagacagatcgcaccaggacagaccggaaagatcgcagactacaactataagctgcctgacgatttcacaggctgcgtgatcgcctggaatagcaacaatctggattccaaagtgggcggcaactacaattatctgtacaggctgttccgcaagtccaacctgaagccatttgagaaagacatctccaccgagatctaccaggccggctctacaccctgcaacggcgtggagggcttcaattgttattttcccctgcagtcttacggcttccagcctacaaatggcgtgggctatcagccataccgggtggtggtgctgtcttttgagctgctgcacgcaccagcaaccgtgtgcggccccaagaagagcacacatcatcaccaccaccaccaccactga

SEQ ID NO: 5930 - DNA, 735 bp, Artificial Sequence
  Description of Artificial Sequence: Synthetic polynucleotide
atgggcatcctgccaagcccaggaatgcccgccctgctgtctctggtgagcctgctgtccgtgctgctgatgggatgcgtggcagagacaggcacaaggttccctaacatcaccaatctgtgcccattcggcgaggtgtttaacgccacacgctttgcctccgtgtatgcctggaaccggaagagaatctctaattgcgtggccgactatagcgtgctgtacaatagcgcctccttctctacctttaagtgctatggcgtgagccccaccaagctgaacgatctgtgcttcacaaacgtgtacgccgactcctttgtgatccggggcgatgaagtgagacagatcgcaccaggacagaccggaaagatcgcagactacaactataagctgcctgacgatttcacaggctgcgtgatcgcctggaatagcaacaatctggattccaaagtgggcggcaactacaattatctgtacaggctgttccgcaagtccaacctgaagccatttgagcgggacatcaataccgagatctaccaggccggctctacaccctgcaacggcgtggagggcttcaattgttattttcccctgcagtcttacggcttccagcctacaaatggcgtgggctatcagccataccgggtggtggtgctgtcttttgagctgctgcacgcaccagcaaccgtgtgcggccccaagaagagcacacatcatcaccaccaccaccaccactga

SEQ ID NO: 5931 - DNA, 735 bp, Artificial Sequence
  Description of Artificial Sequence: Synthetic polynucleotide
atgggcatcctgccaagcccaggaatgcccgccctgctgtctctggtgagcctgctgtccgtgctgctgatgggatgcgtggcagagacaggcacaaggttccctaacatcaccaatctgtgcccattcggcgaggtgtttaacgccacacgctttgcctccgtgtatgcctggaaccggaagagaatctctaattgcgtggccgactatagcgtgctgtacaatagcgcctccttctctacctttaagtgctatggcgtgagccccaccaagctgaacgatctgtgcttcacaaacgtgtacgccgactcctttgtgatccggggcgatgaagtgagacagatcgcaccaggacagaccggaaagatcgcagactacaactataagctgcctgacgatttcacaggctgcgtgatcgcctggaatagcaacactctggattccaaagtgggcggcaactacaattatctgtacaggctgttccgcaagtccaacctgaagccatttgagcgggacatctccaccgagatctaccaggccggctctacaccctgcaacggcgtggagggcttcaattgttattttcccctgcagtcttacggcttccagcctacaaatggcgtgggctatcagccataccgggtggtggtgctgtcttttgagctgctgcacgcaccagcaaccgtgtgcggccccaagaagagcacacatcatcaccaccaccaccaccactga

SEQ ID NO: 5932 - DNA, 735 bp, Artificial Sequence
  Description of Artificial Sequence: Synthetic polynucleotide
atgggcatcctgccaagcccaggaatgcccgccctgctgtctctggtgagcctgctgtccgtgctgctgatgggatgcgtggcagagacaggcacaaggttccctaacatcaccaatctgtgcccattcggcgaggtgtttaacgccacacgctttgcctccgtgtatgcctggaaccggaagagaatctctaattgcgtggccgactatagcgtgctgtacaatagcgcctccttctctacctttaagtgctatggcgtgagccccaccaagctgaacgatctgtgcttcacaaacgtgtacgccgactcctttgtgatccggggcgatgaagtgagacagatcgcaccaggacagaccggaaagatcgcagactacaactataagctgcctgacgatttcacaggctgcgtgatcgcctggaatagcaacaatctggattccaaagtgggcggcaactacaattatctgtacaggctgttccgcaagtccaacctgaagccatttgagcgggacatctccaccgagatctaccaggccggctctacaccctgcaacggcgtggagggcttcaattgttattttcccctgcagtcttacggcttccagcctacaaatggcgtgggctatcagccataccgggtggtggtgctgttctttgagctgctgcacgcaccagcaaccgtgtgcggccccaagaagagcacacatcatcaccaccaccaccaccactga

SEQ ID NO: 5933 - DNA, 735 bp, Artificial Sequence
  Description of Artificial Sequence: Synthetic polynucleotide
atgggcatcctgccaagcccaggaatgcccgccctgctgtctctggtgagcctgctgtccgtgctgctgatgggatgcgtggcagagacaggcacaaggttccctaacatcaccaatctgtgcccattcggcgaggtgtttaacgccacacgctttgcctccgtgtatgcctggaaccggaagagaatctctaattgcgtggccgactatagcgtgctgtacaatagcgcctccttctctacctttaagtgctatggcgtgagccccaccaagctgaacgatctgtgcttcacaaacgtgtacgccgactcctttgtgatccggggcgatgaagtgagacagatcgcaccaggacagaccggaaagatcgcagactacaactataagctgcctgacgatttcacaggctgcgtgatcgcctggaatagcaacaatctggattccaaagtgggcggcaactacaattatctgtacaggctgttccgcaagtccaacctgaagccatttgagcgggacatctccaccgagtcataccaggccggctctacaccctgcaacggcgtggagggcttcaattgttattttcccctgcagtcttacggcttccagcctacaaatggcgtgggctatcagccataccgggtggtggtgctgtcttttgagctgctgcacgcaccagcaaccgtgtgcggccccaagaagagcacacatcatcaccaccaccaccaccactga

SEQ ID NO: 5934 - DNA, 735 bp, Artificial Sequence
  Description of Artificial Sequence: Synthetic polynucleotide
atgggcatcctgccaagcccaggaatgcccgccctgctgtctctggtgagcctgctgtccgtgctgctgatgggatgcgtggcagagacaggcacaaggttccctaacatcaccaatctgtgcccattcggcgaggtgtttaacgccacacgctttgcctccgtgtatgcctggaaccggaagagaatctctaattgcgtggccgactatagcgtgctgtacaatagcgcctccttctctacctttaagtgctatggcgtgagccccaccaagctgaacgatctgtgcttcacaaacgtgtacgccgactcctttgtgatccggggcgatgaagtgagacagatcgcaccaggacagaccggaaagatcgcagactacaactataagctgcctgacgatttcacaggctgcgtgatcgcctggaatagcaacaatctggattccaaagtgggcggcaactacaattatctgtacaggctgttccgcaagtccaacctgaagccatttgagcgggacatctccaccgagatctaccaggccggctctacaccctgcaacggcgtggagggcttcaattgttattttcccctgcagtcttacggcttccagcctacaaatggcgtgggctatcagccataccgggtggtggtgctgtcttttgagctgcgacacgcaccagcaaccgtgtgcggccccaagaagagcacacatcatcaccaccaccaccaccactga

SEQ ID NO: 5935 - DNA, 735 bp, Artificial Sequence
  Description of Artificial Sequence: Synthetic polynucleotide
atgggcatcctgccaagcccaggaatgcccgccctgctgtctctggtgagcctgctgtccgtgctgctgatgggatgcgtggcagagacaggcacaaggttccctaacatcaccaatctgtgcccattcggcgaggtgtttaacgccacacgctttgcctccgtgtatgcctggaaccggaagagaatctctaattgcgtggccgactatagcgtgctgtacacgagcgcctccttctctacctttaagtgctatggcgtgagccccaccaagctgaacgatctgtgcttcacaaacgtgtacgccgactcctttgtgatccggggcgatgaagtgagacagatcgcaccaggacagaccggaaagatcgcagactacaactataagctgcctgacgatttcacaggctgcgtgatcgcctggaatagcaacaatctggattccaaagtgggcggcaactacaattatctgtacaggctgttccgcaagtccaacctgaagccatttgagcgggacatctccaccgagatctaccaggccggctctacaccctgcaacggcgtggagggcttcaattgttattttcccctgcagtcttacggcttccagcctacaaatggcgtgggctatcagccataccgggtggtggtgctgtcttttgagctgctgcacgcaccagcaaccgtgtgcggccccaagaagagcacacatcatcaccaccaccaccaccactga

SEQ ID NO: 5936 - DNA, 735 bp, Artificial Sequence
  Description of Artificial Sequence: Synthetic polynucleotide
atgggcatcctgccaagcccaggaatgcccgccctgctgtctctggtgagcctgctgtccgtgctgctgatgggatgcgtggcagagacaggcacaaggttccctaacatcaccaatctgtgcccattcggcgaggtgtttaacgccacacgctttgcctccgtgtatgcctggaaccggaagagaatctctaattgcgtggccgactatagcgtgctgtacaatagcgcctccttctctacctttaagtgctatggcgtgagccccaccaagctgaacgatctgtgcttcacaaacgtgtacgccgactcctttgtgatccggggcgatgaagtgagacagatcgcaccaggacagaccggaaagatcgcagactacaactataagctgcctgacgatttcacaggctgcgtgatcgcctggaatagcaacaatctggattccaaagtgggcggcaactacaattatctgtacaggctgttccgcaagtccaacctgaagccatttgagcgggacatctccaccgagatctaccaggccggctctacacccacgaacggcgtggagggcttcaattgttattttcccctgcagtcttacggcttccagcctacaaatggcgtgggctatcagccataccgggtggtggtgctgtcttttgagctgctgcacgcaccagcaaccgtgtgcggccccaagaagagcacacatcatcaccaccaccaccaccactga

SEQ ID NO: 5937 - DNA, 735 bp, Artificial Sequence
  Description of Artificial Sequence: Synthetic polynucleotide
atgggcatcctgccaagcccaggaatgcccgccctgctgtctctggtgagcctgctgtccgtgctgctgatgggatgcgtggcagagacaggcacaaggttccctaacatcaccaatctgtgcccattcggcgaggtgtttaacgccacacgctttgcctccgtgtatgcctggaaccggaagagaatctctaattgcgtggccgactatagcgtgctgtacaatagcgcctccttctctacctttaagtgctatggcgtgagccccaccaagctgaacgatctgtgcttcacaaacgtgtacgccgactcctttgtgatccggggcgatgaagtgagacagatcgcaccaggacagaccggaaagatcgcagactacaactataagctgcctgacgatttcacaggctgcgtgatcgcctggaatagcaacaatctggattccaaagtgggcggcaactacaattatctgtacaggctgttccgcaagtccaacctgaagccatttgagcgggacatctccaccactatctaccaggccggctctacaccctgcaacggcgtggagggcttcaattgttattttcccctgcagtcttacggcttccagcctacaaatggcgtgggctatcagccataccgggtggtggtgctgtcttttgagctgctgcacgcaccagcaaccgtgtgcggccccaagaagagcacacatcatcaccaccaccaccaccactga

SEQ ID NO: 5938 - DNA, 735 bp, Artificial Sequence
  Description of Artificial Sequence: Synthetic polynucleotide
atgggcatcctgccaagcccaggaatgcccgccctgctgtctctggtgagcctgctgtccgtgctgctgatgggatgcgtggcagagacaggcacaaggttccctaacatcaccaatctgtgcccattcggcgaggtgtttaacgccacacgctttgcctccgtgtatgcctggaaccggaagagaatctctaattgcgtggccgactatagcgtgctgtacaatagcgcctccttctctacctttaagtgctatggcgtgagccccaccaagctgaacgatctgtgcttcacaaacgtgtacgccgactcctttgtgatccggggcgatgaagtgagacagatcgcaccaggacagaccggaaagatcgcagactacaactataagctgcctgacgatttcacaggctgcgtgatcgcctggaatagcaacaatctggattccaaagtgggcggcaactacaattatctgtacaggctgttccgcaagtccaacctgaagccatttgagcgggacatctccaccgagcaataccaggccggctctacaccctgcaacggcgtggagggcttcaattgttattttcccctgcagtcttacggcttccagcctacaaatggcgtgggctatcagccataccgggtggtggtgctgtcttttgagctgctgcacgcaccagcaaccgtgtgcggccccaagaagagcacacatcatcaccaccaccaccaccactga

SEQ ID NO: 5939 - DNA, 735 bp, Artificial Sequence
  Description of Artificial Sequence: Synthetic polynucleotide
atgggcatcctgccaagcccaggaatgcccgccctgctgtctctggtgagcctgctgtccgtgctgctgatgggatgcgtggcagagacaggcacaaggttccctaacatcaccaatctgtgcccattcggcgaggtgtttaacgccacacgctttgcctccgtgtatgcctggaaccggaagagaatctctaattgcgtggccgactatagcgtgctgtacaatagcgcctccttctctacctttaagtgctatggcgtgagccccaccaagctgaacgatctgtgcttcacaaacgtgtacgccgactcctttgtgatccggggcgatgaagtgagacagatcgcaccaggacagaccggaaagatcgcagactacaactataagctgcctgacgatttcacaggctgcgtgatcgcctggaatagcaacaatctggattccaaagtgggcggcaactacaattatctgtacaggctgttccgcaagtccaacctgaagccatttgagcgggacatctccaccgagatctaccaggccggctctacaccctgcaacggcgtggagggcttcaattgttattttcccctgcagtcttacggcttccagcctacaaatggcgtgggctatcagccataccgggtggtggtgctggcgtttgagctgctgcacgcaccagcaaccgtgtgcggccccaagaagagcacacatcatcaccaccaccaccaccactga

SEQ ID NO: 5940 - DNA, 735 bp, Artificial Sequence
  Description of Artificial Sequence: Synthetic polynucleotide
atgggcatcctgccaagcccaggaatgcccgccctgctgtctctggtgagcctgctgtccgtgctgctgatgggatgcgtggcagagacaggcacaaggttccctaacatcaccaatctgtgcccattcggcgaggtgtttaacgccacacgctttgcctccgtgtatgcctggaaccggaagagaatctctaattgcgtggccgactatagcgtgctgtacaatagcgcctccttctctacctttaagtgctatggcgtgagccccaccaagctgaacgatctgtgcttcacaaacgtgtacgccgactcctttgtgatccggggcgatgaagtgagacagatcgcaccaggacagaccggaaagatcgcagactacaactataagctgcctgacgatttcacaggctgcgtgatcgcctggaatagcaacaatctggattccaaagtgggcggcaactacaattatctgtacaggctgttccgcaagtccaacctgaagccatttgagcgggacatctccaccataatctaccaggccggctctacaccctgcaacggcgtggagggcttcaattgttattttcccctgcagtcttacggcttccagcctacaaatggcgtgggctatcagccataccgggtggtggtgctgtcttttgagctgctgcacgcaccagcaaccgtgtgcggccccaagaagagcacacatcatcaccaccaccaccaccactga

SEQ ID NO: 5941 - DNA, 735 bp, Artificial Sequence
  Description of Artificial Sequence: Synthetic polynucleotide
atgggcatcctgccaagcccaggaatgcccgccctgctgtctctggtgagcctgctgtccgtgctgctgatgggatgcgtggcagagacaggcacaaggttccctaacatcaccaatctgtgcccattcggcgaggtgtttaacgccacacgctttgcctccgtgtatgcctggaaccggaagagaatctctaattgcgtggccgactatagcgtgctgtacaatagcgcctccttctctacctttaagtgctatggcgtgagccccaccaagctgaacgatctgtgcttcacaaacgtgtacgccgactcctttgtgatccggggcgatgaagtgagacagatcgcaccaggacagaccggaaagatcgcagactacaactataagctgcctgacgatttcacaggctgcgtgatcgcctggaatagcaacaatctggattccaaagtgggcggcaactacaattatctgtacaggctgttccgcaagtccaacctgaagccatttgagcgggacatctccaccgagatctaccaggccggctctacaccctgcaacggcgtggagggcttcaattgttattttcccctgcagtcttacggcttccagcctacaaatggcgtgggctatcagccataccgggtggtggtgctgtcttttgagctgagtcacgcaccagcaaccgtgtgcggccccaagaagagcacacatcatcaccaccaccaccaccactga

SEQ ID NO: 5942 - DNA, 735 bp, Artificial Sequence
  Description of Artificial Sequence: Synthetic polynucleotide
atgggcatcctgccaagcccaggaatgcccgccctgctgtctctggtgagcctgctgtccgtgctgctgatgggatgcgtggcagagacaggcacaaggttccctaacatcaccaatctgtgcccattcggcgaggtgtttaacgccacacgctttgcctccgtgtatgcctggaaccggaagagaatctctaattgcgtggccgactatagcgtgctgtacaatagcgcctccttctctacctttaagtgctatggcgtgagccccaccaagctgaacgatctgtgcttcacaaacgtgtacgccgactcctttgtgatccggggcgatgaagtgagacagatcgcaccaggacagaccggaaagatcgcagactacaactataagctgcctgacgatttcacaggctgcgtgatcgcctggaatagcaacaatctggattccaaagtgggcggcaactacaattatctgtacaggctgttccgcaagtccaacctgaagccatttgagcgggacatctccaccgagatctaccaggccggctctacaccctgcaacagtgtggagggcttcaattgttattttcccctgcagtcttacggcttccagcctacaaatggcgtgggctatcagccataccgggtggtggtgctgtcttttgagctgctgcacgcaccagcaaccgtgtgcggccccaagaagagcacacatcatcaccaccaccaccaccactga

SEQ ID NO: 5943 - DNA, 735 bp, Artificial Sequence
  Description of Artificial Sequence: Synthetic polynucleotide
atgggcatcctgccaagcccaggaatgcccgccctgctgtctctggtgagcctgctgtccgtgctgctgatgggatgcgtggcagagacaggcacaaggttccctaacatcaccaatctgtgcccattcggcgaggtgtttaacgccacacgctttgcctccgtgtatgcctggaaccggaagagaatctctaattgcgtggccgactatagcgtgctgtacaatagcgcctccttctctacctttaagtgctatggcgtgagccccaccaagctgaacgatctgtgcttcacaaacgtgtacgccgactcctttgtgatccggggcgatgaagtgagacagatcgcaccaggacagaccggaaagatcgcagactacaactataagctgcctgacgatttcacaggctgcgtgatcgcctggaatagcaacaatctggattccaaagtgggcggcaactacaattatctgtacaggctgttccgcaagtccaacctgaagccatttgagcgggacatcgctaccgagatctaccaggccggctctacaccctgcaacggcgtggagggcttcaattgttattttcccctgcagtcttacggcttccagcctacaaatggcgtgggctatcagccataccgggtggtggtgctgtcttttgagctgctgcacgcaccagcaaccgtgtgcggccccaagaagagcacacatcatcaccaccaccaccaccactga

SEQ ID NO: 5944 - DNA, 735 bp, Artificial Sequence
  Description of Artificial Sequence: Synthetic polynucleotide
atgggcatcctgccaagcccaggaatgcccgccctgctgtctctggtgagcctgctgtccgtgctgctgatgggatgcgtggcagagacaggcacaaggttccctaacatcaccaatctgtgcccattcggcgaggtgtttaacgccacacgctttgcctccgtgtatgcctggaaccggaagagaatctctaattgcgtggccgactatagcgtgctgtacaatagcgcctccttctctacctttaagtgctatggcgtgagccccaccaagctgaacgatctgtgcttcacaaacgtgtacgccgactcctttgtgatccggggcgatgaagtgagacagatcgcaccaggacagaccggaaagatcgcagactacaactataagctgcctgacgatttcacaggctgcgtgatcgcctggaatagcaacaatctggattccaaagtgggcggcaactacaattatctgtacaggctgttccgcaagtccaacctgaagccatttgggcgggacatctccaccgagatctaccaggccggctctacaccctgcaacggcgtggagggcttcaattgttattttcccctgcagtcttacggcttccagcctacaaatggcgtgggctatcagccataccgggtggtggtgctgtcttttgagctgctgcacgcaccagcaaccgtgtgcggccccaagaagagcacacatcatcaccaccaccaccaccactga

SEQ ID NO: 5945 - DNA, 735 bp, Artificial Sequence
  Description of Artificial Sequence: Synthetic polynucleotide
atgggcatcctgccaagcccaggaatgcccgccctgctgtctctggtgagcctgctgtccgtgctgctgatgggatgcgtggcagagacaggcacaaggttccctaacatcaccaatctgtgcccattcggcgaggtgtttaacgccacacgctttgcctccgtgtatgcctggaaccggaagagaatctctaattgcgtggccgactatagcgtgctgtacaatagcgcctccttctctacctttaagtgctatggcgtgagccccaccaagctgaacgatctgtgcttcacaaacgtgtacgccgactcctttgtgatccggggcgatgaagtgagacagatcgcaccaggacagaccggaaagatcgcagactacaactataagctgcctgacgatttcacaggctgcgtgatcgcctggaatagcaacaatctggattccaaacgtggcggcaactacaattatctgtacaggctgttccgcaagtccaacctgaagccatttgagcgggacatctccaccgagatctaccaggccggctctacaccctgcaacggcgtggagggcttcaattgttattttcccctgcagtcttacggcttccagcctacaaatggcgtgggctatcagccataccgggtggtggtgctgtcttttgagctgctgcacgcaccagcaaccgtgtgcggccccaagaagagcacacatcatcaccaccaccaccaccactga

SEQ ID NO: 5946 - DNA, 735 bp, Artificial Sequence
  Description of Artificial Sequence: Synthetic polynucleotide
atgggcatcctgccaagcccaggaatgcccgccctgctgtctctggtgagcctgctgtccgtgctgctgatgggatgcgtggcagagacaggcacaaggttccctaacatcaccaatctgtgcccattcggcgaggtgtttaacgccacacgctttgcctccgtgtatgcctggaaccggaagagaatctctaattgcgtggccgactatagcgtgctgtacaatagcgcctccttctctacctttaagtgctatggcgtgagccccaccaagctgaacgatctgtgcttcacaaacgtgtacgccgactcctttgtgatccggggcgatgaagtgagacagatcgcaccaggacagaccggaaagatcgcagactacaactataagctgcctgacgatttcacaggctgcgtgatcgcctggaatagcaacaatctggattccaaagtgggcggcaactacaattatctgtacaggctgttccgcaagtccaacctgaagccatttgagcgggacatctccaccgagatctaccaggccggctctacaccctgcaacggcgtggagggcttcaattgttattttcccctgcagtcttacggcttccagcctacaaatggcgtgggctatcagccataccgggtggtggtgctgtcttttgagctgctgtgggcaccagcaaccgtgtgcggccccaagaagagcacacatcatcaccaccaccaccaccactga

SEQ ID NO: 5947 - DNA, 735 bp, Artificial Sequence
  Description of Artificial Sequence: Synthetic polynucleotide
atgggcatcctgccaagcccaggaatgcccgccctgctgtctctggtgagcctgctgtccgtgctgctgatgggatgcgtggcagagacaggcacaaggttccctaacatcaccaatctgtgcccattcggcgaggtgtttaacgccacacgctttgcctccgtgtatgcctggaaccggaagagaatctctaattgcgtggccgactatagcgtgctgtacaatagcgcctccttctctacctttaagtgctatggcgtgagccccaccaagctgaacgatctgtgcttcacaaacgtgtacgccgactcctttgtgatccggggcgatgaagtgagacagatcgcaccaggacagaccggaaagatcgcagactacaactataagctgcctgacgatttcacaggctgcgtgatcgcctggaatagcaacaatctggattccaaagtgggcggcaactacaattatctgtacaggctgttccgcaagtccaacctgaagccatttgagcgggacatctcctacgagatctaccaggccggctctacaccctgcaacggcgtggagggcttcaattgttattttcccctgcagtcttacggcttccagcctacaaatggcgtgggctatcagccataccgggtggtggtgctgtcttttgagctgctgcacgcaccagcaaccgtgtgcggccccaagaagagcacacatcatcaccaccaccaccaccactga

SEQ ID NO: 5948 - DNA, 735 bp, Artificial Sequence
  Description of Artificial Sequence: Synthetic polynucleotide
atgggcatcctgccaagcccaggaatgcccgccctgctgtctctggtgagcctgctgtccgtgctgctgatgggatgcgtggcagagacaggcacaaggttccctaacatcaccaatctgtgcccattcggcgaggtgtttaacgccacacgctttgcctccgtgtatgcctggaaccggaagagaatctctaattgcgtggccgactatagcgtgctgtacaatagcgcctccttctctacctttaagtgctatggcgtgagccccaccaagctgaacgatctgtgcttcacaaacgtgtacgccgactcctttgtgatccggggcgatgaagtgagacagatcgcaccaggacagaccggaaagatcgcagactacaactataagctgcctgacgatttcacaggctgcgtgatcgcctggaatagcaacaatctggattccaaagtgggcggcaactacaattatctgtacaggctgttccgcaagtccaacctgaagccatttgagcgggacatctccaaagagatctaccaggccggctctacaccctgcaacggcgtggagggcttcaattgttattttcccctgcagtcttacggcttccagcctacaaatggcgtgggctatcagccataccgggtggtggtgctgtcttttgagctgctgcacgcaccagcaaccgtgtgcggccccaagaagagcacacatcatcaccaccaccaccaccactga

SEQ ID NO: 5949 - DNA, 735 bp, Artificial Sequence
  Description of Artificial Sequence: Synthetic polynucleotide
atgggcatcctgccaagcccaggaatgcccgccctgctgtctctggtgagcctgctgtccgtgctgctgatgggatgcgtggcagagacaggcacaaggttccctaacatcaccaatctgtgcccattcggcgaggtgtttaacgccacacgctttgcctccgtgtatgcctggaaccggaagagaatctctaattgcgtggccgactatagcgtgctgtacaatagcgcctccttctctacctttaagtgctatggcgtgagccccaccaagctgaacgatctgtgcttcacaaacgtgtacgccgactcctttgtgatccggggcgatgaagtgagacagatcgcaccaggacagaccggaaagatcgcagactacaactataagctgcctgacgatttcacaggctgcgtgatcgcctggaatagcaacaatctggattccaaagtgggcggcaactacaattatctgtacaggctgttccgcaagtccaacctgaagccatttgagcgggacatctccaccgagatctaccaggccggctctacaccctgcaacggcgtggagggcttcaattgttattttcccctgcagtcttacggcttccagcctacaaatggcgtgggctatcagccataccgggtggtggtgctgtcttttgagctgctgcaagcaccagcaaccgtgtgcggccccaagaagagcacacatcatcaccaccaccaccaccactga

SEQ ID NO: 5950 - DNA, 735 bp, Artificial Sequence
  Description of Artificial Sequence: Synthetic polynucleotide
atgggcatcctgccaagcccaggaatgcccgccctgctgtctctggtgagcctgctgtccgtgctgctgatgggatgcgtggcagagacaggcacaaggttccctaacatcaccaatctgtgcccattcggcgaggtgtttaacgccacacgctttgcctccgtgtatgcctggaaccggaagagaatctctaattgcgtggccgactatagcgtgctgtacaatagcgcctccttctctacctttaagtgctatggcgtgagccccaccaagctgaacgatctgtgcttcacaaacgtgtacgccgactcctttgtgatccggggcgatgaagtgagacagatcgcaccaggacagaccggaaagatcgcagactacaactataagctgcctgacgatttcacaggctgcgtgatcgcctggaatagcaacaatctggattccaaagtgggcggcaactacaattatctgtacaggctgttccgcaagtccaacctgaagccatttgagcgggacatctccacccgaatctaccaggccggctctacaccctgcaacggcgtggagggcttcaattgttattttcccctgcagtcttacggcttccagcctacaaatggcgtgggctatcagccataccgggtggtggtgctgtcttttgagctgctgcacgcaccagcaaccgtgtgcggccccaagaagagcacacatcatcaccaccaccaccaccactga

SEQ ID NO: 5951 - DNA, 735 bp, Artificial Sequence
  Description of Artificial Sequence: Synthetic polynucleotide
atgggcatcctgccaagcccaggaatgcccgccctgctgtctctggtgagcctgctgtccgtgctgctgatgggatgcgtggcagagacaggcacaaggttccctaacatcaccaatctgtgcccattcggcgaggtgtttaacgccacacgctttgcctccgtgtatgcctggaaccggaagagaatctctaattgcgtggccgactatagcgtgctgtacaatagcgcctccttctctacctttaagtgctatggcgtgagccccaccaagctgaacgatctgtgcttcacaaacgtgtacgccgactcctttgtgatccggggcgatgaagtgagacagatcgcaccaggacagaccggaaagatcgcagactacaactataagctgcctgacgatttcacaggctgcgtgatcgcctggaatagcaacaatctggattccaaagtgggcggcaactacaattatctgtacaggctgttccgcaagtccaacctgaagccatttgagcgggacatctccaccgagatctaccaggccggctctacaccctgcaacggcgtggagggcttcaattgttattttcccctgcagtcttacggcttccagcctacaaatggcgtgggctatcagccataccgggtggtggtgctgtcttttgagctgctgatggcaccagcaaccgtgtgcggccccaagaagagcacacatcatcaccaccaccaccaccactga

SEQ ID NO: 5952 - DNA, 735 bp, Artificial Sequence
  Description of Artificial Sequence: Synthetic polynucleotide
atgggcatcctgccaagcccaggaatgcccgccctgctgtctctggtgagcctgctgtccgtgctgctgatgggatgcgtggcagagacaggcacaaggttccctaacatcaccaatctgtgcccattcggcgaggtgtttaacgccacacgctttgcctccgtgtatgcctggaaccggaagagaatctctaattgcgtggccgactatagcgtgctgtacaatagcgcctccttctctacctttaagtgctatggcgtgagccccaccaagctgaacgatctgtgcttcacaaacgtgtacgccgactcctttgtgatccggggcgatgaagtgagacagatcgcaccaggacagaccggaaagatcgcagactacaactataagctgcctgacgatttcacaggctgcgtgatcgcctggaatagcaacttgctggattccaaagtgggcggcaactacaattatctgtacaggctgttccgcaagtccaacctgaagccatttgagcgggacatctccaccgagatctaccaggccggctctacaccctgcaacggcgtggagggcttcaattgttattttcccctgcagtcttacggcttccagcctacaaatggcgtgggctatcagccataccgggtggtggtgctgtcttttgagctgctgcacgcaccagcaaccgtgtgcggccccaagaagagcacacatcatcaccaccaccaccaccactga

SEQ ID NO: 5953 - DNA, 735 bp, Artificial Sequence
  Description of Artificial Sequence: Synthetic polynucleotide
atgggcatcctgccaagcccaggaatgcccgccctgctgtctctggtgagcctgctgtccgtgctgctgatgggatgcgtggcagagacaggcacaaggttccctaacatcaccaatctgtgcccattcggcgaggtgtttaacgccacacgctttgcctccgtgtatgcctggaaccggaagagaatctctaattgcgtggccgactatagcgtgctgtacaatagcgcctccttctctacctttaagtgctatggcgtgagccccaccaagctgaacgatctgtgcttcacaaacgtgtacgccgactcctttgtgatccggggcgatgaagtgagacagatcgcaccaggacagaccggaaagatcgcagactacaactataagctgcctgacgatttcacaggctgcgtgatcgcctggaatagcaacaatctggattccaaagacggcggcaactacaattatctgtacaggctgttccgcaagtccaacctgaagccatttgagcgggacatctccaccgagatctaccaggccggctctacaccctgcaacggcgtggagggcttcaattgttattttcccctgcagtcttacggcttccagcctacaaatggcgtgggctatcagccataccgggtggtggtgctgtcttttgagctgctgcacgcaccagcaaccgtgtgcggccccaagaagagcacacatcatcaccaccaccaccaccactga

SEQ ID NO: 5954 - DNA, 735 bp, Artificial Sequence
  Description of Artificial Sequence: Synthetic polynucleotide
atgggcatcctgccaagcccaggaatgcccgccctgctgtctctggtgagcctgctgtccgtgctgctgatgggatgcgtggcagagacaggcacaaggttccctaacatcaccaatctgtgcccattcggcgaggtgtttaacgccacacgctttgcctccgtgtatgcctggaaccggaagagaatctctaattgcgtggccgactatagcgtgctgtacaatagcgcctccttctctacctttaagtgctatggcgtgagccccaccaagctgaacgatctgtgcttcacaaacgtgtacgccgactcctttgtgatccggggcgatgaagtgagacagatcgcaccaggacagaccggaaagatcgcagactacaactataagctgcctgacgatttcacaggctgcgtgatcgcctggaatagcaacaatctggattccaaagtgggcggcaactacaattatctgtacaggctgttccgcaagtccaacctgaagccatttgagcgggacatctccaccgagatctaccaggccggctctacaccccaaaacggcgtggagggcttcaattgttattttcccctgcagtcttacggcttccagcctacaaatggcgtgggctatcagccataccgggtggtggtgctgtcttttgagctgctgcacgcaccagcaaccgtgtgcggccccaagaagagcacacatcatcaccaccaccaccaccactga

SEQ ID NO: 5955 - DNA, 735 bp, Artificial Sequence
  Description of Artificial Sequence: Synthetic polynucleotide
atgggcatcctgccaagcccaggaatgcccgccctgctgtctctggtgagcctgctgtccgtgctgctgatgggatgcgtggcagagacaggcacaaggttccctaacatcaccaatctgtgcccattcggcgaggtgtttaacgccacacgctttgcctccgtgtatgcctggaaccggaagagaatctctaattgcgtggccgactatagcgtgctgtacaatagcgcctccttctctacctttaagtgctatggcgtgagccccaccaagctgaacgatctgtgcttcacaaacgtgtacgccgactcctttgtgatccggggcgatgaagtgagacagatcgcaccaggacagaccggaaagatcgcagactacaactataagctgcctgacgatttcacaggctgcgtgatcgcctggaatagcaacaatctggattccaaagtgggcggcaactacaattatctgtacaggctgttccgcaagtccaacctgaagccatttgagcgggacatctccaccgagaattaccaggccggctctacaccctgcaacggcgtggagggcttcaattgttattttcccctgcagtcttacggcttccagcctacaaatggcgtgggctatcagccataccgggtggtggtgctgtcttttgagctgctgcacgcaccagcaaccgtgtgcggccccaagaagagcacacatcatcaccaccaccaccaccactga

SEQ ID NO: 5956 - DNA, 735 bp, Artificial Sequence
  Description of Artificial Sequence: Synthetic polynucleotide
atgggcatcctgccaagcccaggaatgcccgccctgctgtctctggtgagcctgctgtccgtgctgctgatgggatgcgtggcagagacaggcacaaggttccctaacatcaccaatctgtgcccattcggcgaggtgtttaacgccacacgctttgcctccgtgtatgcctggaaccggaagagaatctctaattgcgtggccgactatagcgtgctgtacaatagcgcctccttctctacctttaagtgctatggcgtgagccccaccaagctgaacgatctgtgcttcacaaacgtgtacgccgactcctttgtgatccggggcgatgaagtgagacagatcgcaccaggacagaccggaaagatcgcagactacaactataagctgcctgacgatttcacaggctgcgtgatcgcctggaatagcaacaatctggattccaaagtgggcggcaactacaattatctgtacaggctgttccgcaagtccaacctgaagccatttgagcgggacatctccaccgagatctaccaggccggctctacaccctgcaacggcgtggagggcttcaattgttattttcccctgcagtcttacgatttccagcctacaaatggcgtgggctatcagccataccgggtggtggtgctgtcttttgagctgctgcacgcaccagcaaccgtgtgcggccccaagaagagcacacatcatcaccaccaccaccaccactga

SEQ ID NO: 5957 - protein, 244 aa, Artificial Sequence
  Description of Artificial Sequence: Synthetic polypeptide
MGILPSPGMPALLSLVSLLSVLLMGCVAETGTRFPNITNLCPFGEVFNATRFASVYAWNRKRISNCVADYSVLYNSASFSTFKCYGVSPTKLNDLCFTNVYADSFVIRGDEVRQIAPGQTGKIADYNYKLPDDFTGCVIAWNSNNLDSKVGGNYNYLYRLFRKSNLKPFERDISTEIYQAGSTPCNGVEGFNHYFPLQSYGFQPTNGVGYQPYRVVVLSFELLHAPATVCGPKKSTHHHHHHHH

SEQ ID NO: 5958 - protein, 244 aa, Artificial Sequence
  Description of Artificial Sequence: Synthetic polypeptide
MGILPSPGMPALLSLVSLLSVLLMGCVAETGTRFPPITNLCPFGEVFNATRFASVYAWNRKRISNCVADYSVLYNSASFSTFKCYGVSPTKLNDLCFTNVYADSFVIRGDEVRQIAPGQTGKIADYNYKLPDDFTGCVIAWNSNNLDSKVGGNYNYLYRLFRKSNLKPFERDISTEIYQAGSTPCNGVEGFNCYFPLQSYGFQPTNGVGYQPYRVVVLSFELLHAPATVCGPKKSTHHHHHHHH

SEQ ID NO: 5959 - protein, 244 aa, Artificial Sequence
  Description of Artificial Sequence: Synthetic polypeptide
MGILPSPGMPALLSLVSLLSVLLMGCVAETGTRFPNITNLCPFGEVFNATRFASVYAWNRKRISNCVADVSVLYNSASFSTFKCYGVSPTKLNDLCFTNVYADSFVIRGDEVRQIAPGQTGKIADYNYKLPDDFTGCVIAWNSNNLDSKVGGNYNYLYRLFRKSNLKPFERDISTEIYQAGSTPCNGVEGFNCYFPLQSYGFQPTNGVGYQPYRVVVLSFELLHAPATVCGPKKSTHHHHHHHH

SEQ ID NO: 5960 - protein, 244 aa, Artificial Sequence
  Description of Artificial Sequence: Synthetic polypeptide
MGILPSPGMPALLSLVSLLSVLLMGCVAETGTRFPNITNLCPFGEVFNATRFASVYAWNRKRISNCVADYSVLYNSASFSTFKCYGVSPTKLNDLCFTNVYADSFVIRGDEVRQIAPGQTGKIADYNYKLPDDFTGCVIAWNSNNLDSKVGGNYNYLYRLFRKSNLKPFERDISTEIYQAGSTPCNGVEGFNCYFPLQSYNFQPTNGVGYQPYRVVVLSFELLHAPATVCGPKKSTHHHHHHHH

SEQ ID NO: 5961 - protein, 244 aa, Artificial Sequence
  Description of Artificial Sequence: Synthetic polypeptide
MGILPSPGMPALLSLVSLLSVLLMGCVAETGTRFPNITNLCPFGEVFNATRFASVYAWNRKRISNCVADYSVLYNSASFSTFKCYGVSPTKLNDLCFTNVYADKFVIRGDEVRQIAPGQTGKIADYNYKLPDDFTGCVIAWNSNNLDSKVGGNYNYLYRLFRKSNLKPFERDISTEIYQAGSTPCNGVEGFNCYFPLQSYGFQPTNGVGYQPYRVVVLSFELLHAPATVCGPKKSTHHHHHHHH

SEQ ID NO: 5962 - protein, 244 aa, Artificial Sequence
  Description of Artificial Sequence: Synthetic polypeptide
MGILPSPGMPALLSLVSLLSVLLMGCVAETGTRFPNITNLCPFGEVFNATRFASVYAWNRKRISNCVADYSVLYNSASFSTFKCYGVSPTKLNDLCFTNVYADSFVIRGDEVRQIAPGQTGKIADYNYKLPDDFTGCVIAWNSNNLDSKVGGNYNYLYRLFRKSNLKPFEDDISTEIYQAGSTPCNGVEGFNCYFPLQSYGFQPTNGVGYQPYRVVVLSFELLHAPATVCGPKKSTHHHHHHHH

SEQ ID NO: 5963 - protein, 244 aa, Artificial Sequence
  Description of Artificial Sequence: Synthetic polypeptide
MGILPSPGMPALLSLVSLLSVLLMGCVAETGTRFPNITNLCPFGEVFNATRFASVYAWNRKRISNCVADYSVLYNSASFSTFKCYGVSPTKLNDLCFTNVYADSFVIRGDEVRQIAPGQTGKIADYNYKLPDDFTGCVIAWNSRNLDSKVGGNYNYLYRLFRKSNLKPFERDISTEIYQAGSTPCNGVEGFNCYFPLQSYGFQPTNGVGYQPYRVVVLSFELLHAPATVCGPKKSTHHHHHHHH

SEQ ID NO: 5964 - protein, 244 aa, Artificial Sequence
  Description of Artificial Sequence: Synthetic polypeptide
MGILPSPGMPALLSLVSLLSVLLMGCVAETGTRFPNITNLCPFGEVFNATRFASVYAWNRKRISNCVFDYSVLYNSASFSTFKCYGVSPTKLNDLCFTNVYADSFVIRGDEVRQIAPGQTGKIADYNYKLPDDFTGCVIAWNSNNLDSKVGGNYNYLYRLFRKSNLKPFERDISTEIYQAGSTPCNGVEGFNCYFPLQSYGFQPTNGVGYQPYRVVVLSFELLHAPATVCGPKKSTHHHHHHHH

SEQ ID NO: 5965 - protein, 244 aa, Artificial Sequence
  Description of Artificial Sequence: Synthetic polypeptide
MGILPSPGMPALLSLVSLLSVLLMGCVAETGTRFPNITNLCPFGEVFNATRFASVYAWNRKRISNCVADYSVLYNSASFSTFKCYGVSATKLNDLCFTNVYADSFVIRGDEVRQIAPGQTGKIADYNYKLPDDFTGCVIAWNSNNLDSKVGGNYNYLYRLFRKSNLKPFERDISTEIYQAGSTPCNGVEGFNCYFPLQSYGFQPTNGVGYQPYRVVVLSFELLHAPATVCGPKKSTHHHHHHHH

SEQ ID NO: 5966 - protein, 244 aa, Artificial Sequence
  Description of Artificial Sequence: Synthetic polypeptide
MGILPSPGMPALLSLVSLLSVLLMGCVAETGTRFPNITNLCPFGEVFNATRFASVYAWNRKRISNCVADYSVLYNSASFSTFKCYGVSPTKLNDLCFTNVYADSFVIRGDEVRQIAPGQTGKIADYNYKLPDDFTGCVIAWNSNNLDSKVGGNYNYLYRLFRKSNLKPFERDISTEHYQAGSTPCNGVEGFNCYFPLQSYGFQPTNGVGYQPYRVVVLSFELLHAPATVCGPKKSTHHHHHHHH

SEQ ID NO: 5967 - protein, 244 aa, Artificial Sequence
  Description of Artificial Sequence: Synthetic polypeptide
MGILPSPGMPALLSLVSLLSVLLMGCVAETGTRFPNITNLCPFGEVFNATRFASVYAWNRKRISNCVADYSVLYNSASFSTFKCYGVSPTKLNDLCFTNVYADSFVIRGDEVRQIAPGQTGKIADYNYKLPDDFTGCVIAWNSNNLDSKVGGNYNYLYRLFRKSNLKPFERDISTEEYQAGSTPCNGVEGFNCYFPLQSYGFQPTNGVGYQPYRVVVLSFELLHAPATVCGPKKSTHHHHHHHH

SEQ ID NO: 5968 - protein, 244 aa, Artificial Sequence
  Description of Artificial Sequence: Synthetic polypeptide
MGILPSPGMPALLSLVSLLSVLLMGCVAETGTRFPNITNLCPFGEVFNATRFASVYAWNRKRISNCVADYSVLYNSASFSTFKCYGVSPTKLNDLCFTNVYADSFVIRGDEVRQIAPGQTGKIADYNYKLPDDFTGCVIAWNSHNLDSKVGGNYNYLYRLFRKSNLKPFERDISTEIYQAGSTPCNGVEGFNCYFPLQSYGFQPTNGVGYQPYRVVVLSFELLHAPATVCGPKKSTHHHHHHHH

SEQ ID NO: 5969 - protein, 244 aa, Artificial Sequence
  Description of Artificial Sequence: Synthetic polypeptide
MGILPSPGMPALLSLVSLLSVLLMGCVAETGTRFPNITNLCPFGEVFNATRFASVYAWNRKRISNCVADYSVLYNSASFSTFKCYGVSPTKLNDLCFTNVYADSFVIRGDEVRQIAPGQTGKIADYNYKLPDDFTGCVIAWNSNNLDSKVGGNYNYLYRLFRKSNLGPFERDISTEIYQAGSTPCNGVEGFNCYFPLQSYGFQPTNGVGYQPYRVVVLSFELLHAPATVCGPKKSTHHHHHHHH

SEQ ID NO: 5970 - protein, 244 aa, Artificial Sequence
  Description of Artificial Sequence: Synthetic polypeptide
MGILPSPGMPALLSLVSLLSVLLMGCVAETGTRFPNITNLCPFGEVFNATRFASVYAWNRKRISNCVADYSVLYNSASFSTFKCYGVSPTKLNDLCFTNVYADSFVIRGDEVRQIAPGQTGKIADYNYKLPDDFTGCVIAWNSCNLDSKVGGNYNYLYRLFRKSNLKPFERDISTEIYQAGSTPCNGVEGFNCYFPLQSYGFQPTNGVGYQPYRVVVLSFELLHAPATVCGPKKSTHHHHHHHH

SEQ ID NO: 5971 - protein, 244 aa, Artificial Sequence
  Description of Artificial Sequence: Synthetic polypeptide
MGILPSPGMPALLSLVSLLSVLLMGCVAETGTRFPNITNLCPFGEVFNATRFASVYAWNRKRISNCVADYSVLYNSASFSTFKCYGVSPTKLNDLCFTNVYADSFVIRGDEVRQIAPGQTGKIADYNYKLPDDFTGCVIAWNSNNLDSKVGGNYNYLYRLFRKSNLKPFERDISTEIYQAGSTPCNGVEGFNCYFPLQSYGFQPTNGVGYQPHRVVVLSFELLHAPATVCGPKKSTHHHHHHHH

SEQ ID NO: 5972 - protein, 244 aa, Artificial Sequence
  Description of Artificial Sequence: Synthetic polypeptide
MGILPSPGMPALLSLVSLLSVLLMGCVAETGTRFPNITNLCPFGEVFNATRFASVYAWNRKRISNCVADYSVLYNSASFSTFKCYGVSPTKLNDLCFTNVYADSFVIRGDEVRQIAPGQTGKIADYNYKLPDDFTGCVIAWNSNNLDSKVGGNYNYLYRLFRKSNLKPFERDISTEIYQAGSTPYNGVEGFNCYFPLQSYGFQPTNGVGYQPYRVVVLSFELLHAPATVCGPKKSTHHHHHHHH

SEQ ID NO: 5973 - protein, 244 aa, Artificial Sequence
  Description of Artificial Sequence: Synthetic polypeptide
MGILPSPGMPALLSLVSLLSVLLMGCVAETGTRFPNITNLCPFGEVFNATRFASVYAWNRKRISNCVADYSVLYNSASFSTFKCYGVSPTKLNDLCFTNVYADSFVIRGDEVKQIAPGQTGKIADYNYKLPDDFTGCVIAWNSNNLDSKVGGNYNYLYRLFRKSNLKPFERDISTEIYQAGSTPCNGVEGFNCYFPLQSYGFQPTNGVGYQPYRVVVLSFELLHAPATVCGPKKSTHHHHHHHH

SEQ ID NO: 5974 - protein, 244 aa, Artificial Sequence
  Description of Artificial Sequence: Synthetic polypeptide
MGILPSPGMPALLSLVSLLSVLLMGCVAETGTRFPNITNLCPFGEVFNATRFASVYAWNRKRISNCVADYSVLYNSASFSTFKCYGVSPTKLNDLCFTNVYADSFVIRGDEVRQIAPGQTGKIADYNYKLPDDFTGCVIAWNSNNLDSKVGGNYNYLYRLFRKSNLKPFERDISSEIYQAGSTPCNGVEGFNCYFPLQSYGFQPTNGVGYQPYRVVVLSFELLHAPATVCGPKKSTHHHHHHHH

SEQ ID NO: 5975 - protein, 244 aa, Artificial Sequence
  Description of Artificial Sequence: Synthetic polypeptide
MGILPSPGMPALLSLVSLLSVLLMGCVAETGTRFPNITNLCPFGEVFNATRFASVYAWNRKRISNCVADYSVLYNSASFSTFKCYGVSPTKLNDLCFTNVYADSFVIRGDEVRQIAPGQTGKIADYNYKLPDDFTGCVIAWNSNNLDSKVGGNYNYLYRLFRKSNLKPFERDISTEIYQAGSTPCNGVEGFNQYFPLQSYGFQPTNGVGYQPYRVVVLSFELLHAPATVCGPKKSTHHHHHHHH

SEQ ID NO: 5976 - protein, 244 aa, Artificial Sequence
  Description of Artificial Sequence: Synthetic polypeptide
MGILPSPGMPALLSLVSLLSVLLMGCVAETGTRFPNITNLCPFGEVFNATRFASVYAWNRKRISNCVADYSVLYNSASFSTFKCYGVSPTKLNDLCFTNVYADSFVIRGDEVRQIAPGQTGKIADYNYKLPDDFTGCVIAWNSNNLDSKVGGNYNYLYRLFRKSNLKPFERDISAEIYQAGSTPCNGVEGFNCYFPLQSYGFQPTNGVGYQPYRVVVLSFELLHAPATVCGPKKSTHHHHHHHH

SEQ ID NO: 5977 - protein, 244 aa, Artificial Sequence
  Description of Artificial Sequence: Synthetic polypeptide
MGILPSPGMPALLSLVSLLSVLLMGCVAETGTRFPNITNLCPFGEVFNATRFASVYAWNRKRISNCVADYSVLYNSASFSTFKCYGVSPTKLNDLCFTNVYADSFVIRGDEVRQIAPGQTGKIADYNYKLPDDFTGCVIAWNSINLDSKVGGNYNYLYRLFRKSNLKPFERDISTEIYQAGSTPCNGVEGFNCYFPLQSYGFQPTNGVGYQPYRVVVLSFELLHAPATVCGPKKSTHHHHHHHH

SEQ ID NO: 5978 - protein, 244 aa, Artificial Sequence
  Description of Artificial Sequence: Synthetic polypeptide
MGILPSPGMPALLSLVSLLSVLLMGCVAETGTRFPNITNLCPFGEVFNATRFASVYAWNRKRISNCVADYSVLYNSASFSTFKCYGVSPTKLNDLCFTNVYADSFLIRGDEVRQIAPGQTGKIADYNYKLPDDFTGCVIAWNSNNLDSKVGGNYNYLYRLFRKSNLKPFERDISTEIYQAGSTPCNGVEGFNCYFPLQSYGFQPTNGVGYQPYRVVVLSFELLHAPATVCGPKKSTHHHHHHHH

SEQ ID NO: 5979 - protein, 244 aa, Artificial Sequence
  Description of Artificial Sequence: Synthetic polypeptide
MGILPSPGMPALLSLVSLLSVLLMGCVAETGTRFPNITNLCPYGEVFNATRFASVYAWNRKRISNCVADYSVLYNSASFSTFKCYGVSPTKLNDLCFTNVYADSFVIRGDEVRQIAPGQTGKIADYNYKLPDDFTGCVIAWNSNNLDSKVGGNYNYLYRLFRKSNLKPFERDISTEIYQAGSTPCNGVEGFNCYFPLQSYGFQPTNGVGYQPYRVVVLSFELLHAPATVCGPKKSTHHHHHHHH

SEQ ID NO: 5980 - protein, 244 aa, Artificial Sequence
  Description of Artificial Sequence: Synthetic polypeptide
MGILPSPGMPALLSLVSLLSVLLMGCVAETGTRFPNITNLCPFGEVFNATRFASVYAWNRKRISNCVADYSVLYNSASFSTFKCYGVSPTKLNDLCFTNVYADSFVIRGDEVRQIAPGQTGKIADYNYKLPDDFTGCVIAWNSNNLDSKKGGNYNYLYRLFRKSNLKPFERDISTEIYQAGSTPCNGVEGFNCYFPLQSYGFQPTNGVGYQPYRVVVLSFELLHAPATVCGPKKSTHHHHHHHH

SEQ ID NO: 5981 - protein, 244 aa, Artificial Sequence
  Description of Artificial Sequence: Synthetic polypeptide
MGILPSPGMPALLSLVSLLSVLLMGCVAETGTRFPNITNLCPFGEVFNATRFASVYAWNRKRISNCVADYSVLYNSASFSTFKCYGVSKTKLNDLCFTNVYADSFVIRGDEVRQIAPGQTGKIADYNYKLPDDFTGCVIAWNSNNLDSKVGGNYNYLYRLFRKSNLKPFERDISTEIYQAGSTPCNGVEGFNCYFPLQSYGFQPTNGVGYQPYRVVVLSFELLHAPATVCGPKKSTHHHHHHHH

SEQ ID NO: 5982 - protein, 244 aa, Artificial Sequence
  Description of Artificial Sequence: Synthetic polypeptide
MGILPSPGMPALLSLVSLLSVLLMGCVAETGTRFPNITNLCPFGEVFNATRFASVYAWNRKRISNCVADYSVLYNSASFSTFKCYGVSPTKLNDLCFTNVYADSFVIRGDEVRQIAPGQTGKIADYNYKLPDDFTGCVIAWNSNNLDSKQGGNYNYLYRLFRKSNLKPFERDISTEIYQAGSTPCNGVEGFNCYFPLQSYGFQPTNGVGYQPYRVVVLSFELLHAPATVCGPKKSTHHHHHHHH

SEQ ID NO: 5983 - protein, 244 aa, Artificial Sequence
  Description of Artificial Sequence: Synthetic polypeptide
MGILPSPGMPALLSLVSLLSVLLMGCVAETGTRFPNITNLCPFGEVFNATRFASVYAWNRKRISNCVADYSVLYNSASFSTFKCYGVSPTKLNDLCFTNVYADSFVIRGDEVRQIAPGQTGKIADYNYKLPDDFTGCVIAWNSNNLDSKVGGNYNYLYRLFRKSNLKPFERDISTERYQAGSTPCNGVEGFNCYFPLQSYGFQPTNGVGYQPYRVVVLSFELLHAPATVCGPKKSTHHHHHHHH

SEQ ID NO: 5984 - protein, 244 aa, Artificial Sequence
  Description of Artificial Sequence: Synthetic polypeptide
MGILPSPGMPALLSLVSLLSVLLMGCVAETGTRFPNITNLCPFGEVFNATRFASVYAWNRKRISNCVADYSVLYNSASFSTFKCYGVSPTKLNDLCFTNVYADSFVIRGDEVRQIAPGQTGKIADYNYVLPDDFTGCVIAWNSNNLDSKVGGNYNYLYRLFRKSNLKPFERDISTEIYQAGSTPCNGVEGFNCYFPLQSYGFQPTNGVGYQPYRVVVLSFELLHAPATVCGPKKSTHHHHHHHH

SEQ ID NO: 5985 - protein, 244 aa, Artificial Sequence
  Description of Artificial Sequence: Synthetic polypeptide
MGILPSPGMPALLSLVSLLSVLLMGCVAETGTRFPNITNLCPFGEVFNATRFASVYAWNRKRISNCVADYSVLYNSASFSTFKCYGVSPTKLNDLCFTNVYADSFVIRGDEVRQIAPGQTGKIADYNYKLPDDFTGCVIAWNSNNLDSKVGGNYNYLYRLFRKSNLKPFEIDISTEIYQAGSTPCNGVEGFNCYFPLQSYGFQPTNGVGYQPYRVVVLSFELLHAPATVCGPKKSTHHHHHHHH

SEQ ID NO: 5986 - protein, 244 aa, Artificial Sequence
  Description of Artificial Sequence: Synthetic polypeptide
MGILPSPGMPALLSLVSLLSVLLMGCVAETGTRFPNITNLCPFGEVFNATRFASVYAWNRKRISNCVADYSVLYNSASFSTFKCYGVSPTKLNDLCFTNVYADSFVIRGDEVRQIAPGQTGKIADYNYKLPDDFTGCVIAWNSNNLDSKVGGNYNYLYRLFRKSNLKPFERDISEEIYQAGSTPCNGVEGFNCYFPLQSYGFQPTNGVGYQPYRVVVLSFELLHAPATVCGPKKSTHHHHHHHH

SEQ ID NO: 5987 - protein, 244 aa, Artificial Sequence
  Description of Artificial Sequence: Synthetic polypeptide
MGILPSPGMPALLSLVSLLSVLLMGCVAETGTRFPNITNLCPFGEVFNATRFASVYAWNRKRWSNCVADYSVLYNSASFSTFKCYGVSPTKLNDLCFTNVYADSFVIRGDEVRQIAPGQTGKIADYNYKLPDDFTGCVIAWNSNNLDSKVGGNYNYLYRLFRKSNLKPFERDISTEIYQAGSTPCNGVEGFNCYFPLQSYGFQPTNGVGYQPYRVVVLSFELLHAPATVCGPKKSTHHHHHHHH

SEQ ID NO: 5988 - protein, 244 aa, Artificial Sequence
  Description of Artificial Sequence: Synthetic polypeptide
MGILPSPGMPALLSLVSLLSVLLMGCVAETGTRFPNITNLCPFGEVFNATRFASVYAWNRKRISNCVADYSVLYNSASFSTFKCYGVSPTKLNDLCFTNVYADSFVIRGDEVRQIAPGQTGKIADYNYKLPDDFTGCVIAWNSVNLDSKVGGNYNYLYRLFRKSNLKPFERDISTEIYQAGSTPCNGVEGFNCYFPLQSYGFQPTNGVGYQPYRVVVLSFELLHAPATVCGPKKSTHHHHHHHH

SEQ ID NO: 5989 - protein, 244 aa, Artificial Sequence
  Description of Artificial Sequence: Synthetic polypeptide
MGILPSPGMPALLSLVSLLSVLLMGCVAETGTRFPNITNLCPFGEVFNATRFASVYAWNRKRISNCVADYSVLYNSASFSTFKCYGVSPTKLNDLCFTNVYADSFVIRGDEVRQIAPGQTGKIADYNYKLPDDFTGCVIAWNSNNLDSKLGGNYNYLYRLFRKSNLKPFERDISTEIYQAGSTPCNGVEGFNCYFPLQSYGFQPTNGVGYQPYRVVVLSFELLHAPATVCGPKKSTHHHHHHHH

SEQ ID NO: 5990 - protein, 244 aa, Artificial Sequence
  Description of Artificial Sequence: Synthetic polypeptide
MGILPSPGMPALLSLVSLLSVLLMGCVAETGTRFPNITNLCPFGEVFNATRFASVSAWNRKRISNCVADYSVLYNSASFSTFKCYGVSPTKLNDLCFTNVYADSFVIRGDEVRQIAPGQTGKIADYNYKLPDDFTGCVIAWNSNNLDSKVGGNYNYLYRLFRKSNLKPFERDISTEIYQAGSTPCNGVEGFNCYFPLQSYGFQPTNGVGYQPYRVVVLSFELLHAPATVCGPKKSTHHHHHHHH

SEQ ID NO: 5991 - protein, 244 aa, Artificial Sequence
  Description of Artificial Sequence: Synthetic polypeptide
MGILPSPGMPALLSLVSLLSVLLMGCVAETGTRFPNITNLCPFGEVFNATRFASVYAWNRKRISNCVADYSVLYNSASFSTFKCYGVSPTKLNDLCFTNVYADSFVIRGDEVRQIAPGQTGKIADYNYKLPDDFTGCVIAWNSNNLDSKVGGNYNYLYRLFRKSNLKPFERDISDEIYQAGSTPCNGVEGFNCYFPLQSYGFQPTNGVGYQPYRVVVLSFELLHAPATVCGPKKSTHHHHHHHH

SEQ ID NO: 5992 - protein, 244 aa, Artificial Sequence
  Description of Artificial Sequence: Synthetic polypeptide
MGILPSPGMPALLSLVSLLSVLLMGCVAETGTRFPNITNLCPFGEVFNATRFASVYAWNRKRISNCVADYSVLYNSASFSTFKCYGVSPTKLNDLCFTNVYADSFVIRGDEVRQIAPGQTGKIADYNYKLPDDFTGCVIAWNSNNLDSKVGGNYNYLYRLFRKSNLKPFERDIGTEIYQAGSTPCNGVEGFNCYFPLQSYGFQPTNGVGYQPYRVVVLSFELLHAPATVCGPKKSTHHHHHHHH

SEQ ID NO: 5993 - protein, 244 aa, Artificial Sequence
  Description of Artificial Sequence: Synthetic polypeptide
MGILPSPGMPALLSLVSLLSVLLMGCVAETGTRFPNITNLCPFGEVFNATRFASVYAWNRKRISNCVADYSALYNSASFSTFKCYGVSPTKLNDLCFTNVYADSFVIRGDEVRQIAPGQTGKIADYNYKLPDDFTGCVIAWNSNNLDSKVGGNYNYLYRLFRKSNLKPFERDISTEIYQAGSTPCNGVEGFNCYFPLQSYGFQPTNGVGYQPYRVVVLSFELLHAPATVCGPKKSTHHHHHHHH

SEQ ID NO: 5994 - protein, 244 aa, Artificial Sequence
  Description of Artificial Sequence: Synthetic polypeptide
MGILPSPGMPALLSLVSLLSVLLMGCVAETGTRFPNITNLCPFGEVFNATRFASVYAWNRKRISNCVADYSVLYNTASFSTFKCYGVSPTKLNDLCFTNVYADSFVIRGDEVRQIAPGQTGKIADYNYKLPDDFTGCVIAWNSNNLDSKVGGNYNYLYRLFRKSNLKPFERDISTEIYQAGSTPCNGVEGFNCYFPLQSYGFQPTNGVGYQPYRVVVLSFELLHAPATVCGPKKSTHHHHHHHH

SEQ ID NO: 5995 - protein, 244 aa, Artificial Sequence
  Description of Artificial Sequence: Synthetic polypeptide
MGILPSPGMPALLSLVSLLSVLLMGCVAETGTRFPNITNLCPFGEVFNATRFASVYAWNRKRISNCVADYSVLYNSASFSTFKCYGVSPTKLNDLCVTNVYADSFVIRGDEVRQIAPGQTGKIADYNYKLPDDFTGCVIAWNSNNLDSKVGGNYNYLYRLFRKSNLKPFERDISTEIYQAGSTPCNGVEGFNCYFPLQSYGFQPTNGVGYQPYRVVVLSFELLHAPATVCGPKKSTHHHHHHHH

SEQ ID NO: 5996 - protein, 244 aa, Artificial Sequence
  Description of Artificial Sequence: Synthetic polypeptide
MGILPSPGMPALLSLVSLLSVLLMGCVAETGTRFPNITNLCPFGEVFNATRFASVYAWNRKRISNCVADYSVLYNSASFSTFKCYGVSPTKLNDLCFTNVYADSFVIRGDEVRQIAPGQTGKIADYNYKLPDDFTGCVIAWNSNNLDSKVGGNYNYLYRLFRKSNLKPFERDIETEIYQAGSTPCNGVEGFNCYFPLQSYGFQPTNGVGYQPYRVVVLSFELLHAPATVCGPKKSTHHHHHHHH

SEQ ID NO: 5997 - protein, 244 aa, Artificial Sequence
  Description of Artificial Sequence: Synthetic polypeptide
MGILPSPGMPALLSLVSLLSVLLMGCVAETGTRFPNITNLCPFGEVFNATRFASVYAWNRKRISNCVADLSVLYNSASFSTFKCYGVSPTKLNDLCFTNVYADSFVIRGDEVRQIAPGQTGKIADYNYKLPDDFTGCVIAWNSNNLDSKVGGNYNYLYRLFRKSNLKPFERDISTEIYQAGSTPCNGVEGFNCYFPLQSYGFQPTNGVGYQPYRVVVLSFELLHAPATVCGPKKSTHHHHHHHH

SEQ ID NO: 5998 - protein, 244 aa, Artificial Sequence
  Description of Artificial Sequence: Synthetic polypeptide
MGILPSPGMPALLSLVSLLSVLLMGCVAETGTRFPDITNLCPFGEVFNATRFASVYAWNRKRISNCVADYSVLYNSASFSTFKCYGVSPTKLNDLCFTNVYADSFVIRGDEVRQIAPGQTGKIADYNYKLPDDFTGCVIAWNSNNLDSKVGGNYNYLYRLFRKSNLKPFERDISTEIYQAGSTPCNGVEGFNCYFPLQSYGFQPTNGVGYQPYRVVVLSFELLHAPATVCGPKKSTHHHHHHHH

SEQ ID NO: 5999 - protein, 244 aa, Artificial Sequence
  Description of Artificial Sequence: Synthetic polypeptide
MGILPSPGMPALLSLVSLLSVLLMGCVAETGTRFPNITNLCPFGEVFNATRFASVYAWNRKRISNCVADYSVLYNSASFSTFKCYGVSPTKLNDLCFTNVYADSFVIRGDEVRQIAPGQTGKIADYNYKLPDDFTGCVIAWNSNNLDSKVGGNYNYLYRLFRKSNLKPFERDISTEIYQAGSTPCNGVEGFNCYFPLQSYGFQPTNGVKYQPYRVVVLSFELLHAPATVCGPKKSTHHHHHHHH

SEQ ID NO: 6000 - protein, 244 aa, Artificial Sequence
  Description of Artificial Sequence: Synthetic polypeptide
MGILPSPGMPALLSLVSLLSVLLMGCVAETGTRFPNITNLCPFGEVFNATRFASVYAWNRKRISNCVADYSVLYNSASFSTFKCYGVSPTKLNDLCFTNVYADSFVIRGDEVRQIAPGQTGKIADYNYKLPDDFTGCVIAWNSNNLDSKVGGNYNYLYRLFRKSNLKPFERDISTEWYQAGSTPCNGVEGFNCYFPLQSYGFQPTNGVGYQPYRVVVLSFELLHAPATVCGPKKSTHHHHHHHH

SEQ ID NO: 6001 - protein, 244 aa, Artificial Sequence
  Description of Artificial Sequence: Synthetic polypeptide
MGILPSPGMPALLSLVSLLSVLLMGCVAETGTRFPNITNLCPFGEVFNATRFASVYAWNRKRISNCVADYSVLYNSASFSTFKCYGVSPTKLNDLCFTNVYADSFVIRGDEVRQIAPGQTGKIADYNYKLPDDFTGCVIAWNSNNLDSKVGGNYNYLYRLFRKSNLRPFERDISTEIYQAGSTPCNGVEGFNCYFPLQSYGFQPTNGVGYQPYRVVVLSFELLHAPATVCGPKKSTHHHHHHHH

SEQ ID NO: 6002 - protein, 244 aa, Artificial Sequence
  Description of Artificial Sequence: Synthetic polypeptide
MGILPSPGMPALLSLVSLLSVLLMGCVAETGTRFPNITNLCPFGEVFNATRFASVYAPNRKRISNCVADYSVLYNSASFSTFKCYGVSPTKLNDLCFTNVYADSFVIRGDEVRQIAPGQTGKIADYNYKLPDDFTGCVIAWNSNNLDSKVGGNYNYLYRLFRKSNLKPFERDISTEIYQAGSTPCNGVEGFNCYFPLQSYGFQPTNGVGYQPYRVVVLSFELLHAPATVCGPKKSTHHHHHHHH

SEQ ID NO: 6003 - protein, 244 aa, Artificial Sequence
  Description of Artificial Sequence: Synthetic polypeptide
MGILPSPGMPALLSLVSLLSVLLMGCVAETGTRFPNITNLCPFGEVFNATRFASVYAWNRKRISNCVADYSVLYNSASFSTFKCYGVSPTKLNDLCFTNVYADSFVIRGDEVRQIAPGQTGKIADYNYKLPDDFTGCVIAWNSNNLDSKVGGNYNYLYRLFRKSNLKPFENDISTEIYQAGSTPCNGVEGFNCYFPLQSYGFQPTNGVGYQPYRVVVLSFELLHAPATVCGPKKSTHHHHHHHH

SEQ ID NO: 6004 - protein, 244 aa, Artificial Sequence
  Description of Artificial Sequence: Synthetic polypeptide
MGILPSPGMPALLSLVSLLSVLLMGCVAETGTRFPNITNLCPFGEVFNATRFASVYAWNRKRISNCTADYSVLYNSASFSTFKCYGVSPTKLNDLCFTNVYADSFVIRGDEVRQIAPGQTGKIADYNYKLPDDFTGCVIAWNSNNLDSKVGGNYNYLYRLFRKSNLKPFERDISTEIYQAGSTPCNGVEGFNCYFPLQSYGFQPTNGVGYQPYRVVVLSFELLHAPATVCGPKKSTHHHHHHHH

SEQ ID NO: 6005 - protein, 244 aa, Artificial Sequence
  Description of Artificial Sequence: Synthetic polypeptide
MGILPSPGMPALLSLVSLLSVLLMGCVAETGTRFPNITNLCPFGEVFNATRFASVYAWNRKRISNCVADYSVLYNSASFSTFKCYGVSPTKLNDLCFTNVYADSFVIRGDEVRQIAPGQTGKIADYNYKLPDDFTGCVIAWNSNNLDSKVGGNYNYLYRLFRKSNLKPFEVDISTEIYQAGSTPCNGVEGFNCYFPLQSYGFQPTNGVGYQPYRVVVLSFELLHAPATVCGPKKSTHHHHHHHH

SEQ ID NO: 6006 - protein, 244 aa, Artificial Sequence
  Description of Artificial Sequence: Synthetic polypeptide
MGILPSPGMPALLSLVSLLSVLLMGCVAETGTRFPAITNLCPFGEVFNATRFASVYAWNRKRISNCVADYSVLYNSASFSTFKCYGVSPTKLNDLCFTNVYADSFVIRGDEVRQIAPGQTGKIADYNYKLPDDFTGCVIAWNSNNLDSKVGGNYNYLYRLFRKSNLKPFERDISTEIYQAGSTPCNGVEGFNCYFPLQSYGFQPTNGVGYQPYRVVVLSFELLHAPATVCGPKKSTHHHHHHHH

SEQ ID NO: 6007 - protein, 244 aa, Artificial Sequence
  Description of Artificial Sequence: Synthetic polypeptide
MGILPSPGMPALLSLVSLLSVLLMGCVAETGTRFPNITNLCPFGEVFNATRFASVYAWNRKRISNCVADYSVLYNSASFSTFKCYGVSPTKLNDLCFTNVYADSFVIRGDEVRQIAPGQTGKIADYNYKLPDDFTGCVIAWNSNNLDSKVGGNYNYLYRLFRKSNLKPFERDISTEIYQAGSTPCNGVEGFNCYFPLQSYGFQPTNGVGYQPYRVVVLSFELLFAPATVCGPKKSTHHHHHHHH

SEQ ID NO: 6008 - protein, 244 aa, Artificial Sequence
  Description of Artificial Sequence: Synthetic polypeptide
MGILPSPGMPALLSLVSLLSVLLMGCVAETGTRFPNITNLCPFGEVFNATRFASVYAWNRKRISNCVADYSVLYNSASFSSFKCYGVSPTKLNDLCFTNVYADSFVIRGDEVRQIAPGQTGKIADYNYKLPDDFTGCVIAWNSNNLDSKVGGNYNYLYRLFRKSNLKPFERDISTEIYQAGSTPCNGVEGFNCYFPLQSYGFQPTNGVGYQPYRVVVLSFELLHAPATVCGPKKSTHHHHHHHH

SEQ ID NO: 6009 - protein, 244 aa, Artificial Sequence
  Description of Artificial Sequence: Synthetic polypeptide
MGILPSPGMPALLSLVSLLSVLLMGCVAETGTRFPNITNLCPFGEYFNATRFASVYAWNRKRISNCVADYSVLYNSASFSTFKCYGVSPTKLNDLCFTNVYADSFVIRGDEVRQIAPGQTGKIADYNYKLPDDFTGCVIAWNSNNLDSKVGGNYNYLYRLFRKSNLKPFERDISTEIYQAGSTPCNGVEGFNCYFPLQSYGFQPTNGVGYQPYRVVVLSFELLHAPATVCGPKKSTHHHHHHHH

SEQ ID NO: 6010 - protein, 244 aa, Artificial Sequence
  Description of Artificial Sequence: Synthetic polypeptide
MGILPSPGMPALLSLVSLLSVLLMGCVAETGTRFPNITNLCPMGEVFNATRFASVYAWNRKRISNCVADYSVLYNSASFSTFKCYGVSPTKLNDLCFTNVYADSFVIRGDEVRQIAPGQTGKIADYNYKLPDDFTGCVIAWNSNNLDSKVGGNYNYLYRLFRKSNLKPFERDISTEIYQAGSTPCNGVEGFNCYFPLQSYGFQPTNGVGYQPYRVVVLSFELLHAPATVCGPKKSTHHHHHHHH

SEQ ID NO: 6011 - protein, 244 aa, Artificial Sequence
  Description of Artificial Sequence: Synthetic polypeptide
MGILPSPGMPALLSLVSLLSVLLMGCVAETGTRFPRITNLCPFGEVFNATRFASVYAWNRKRISNCVADYSVLYNSASFSTFKCYGVSPTKLNDLCFTNVYADSFVIRGDEVRQIAPGQTGKIADYNYKLPDDFTGCVIAWNSNNLDSKVGGNYNYLYRLFRKSNLKPFERDISTEIYQAGSTPCNGVEGFNCYFPLQSYGFQPTNGVGYQPYRVVVLSFELLHAPATVCGPKKSTHHHHHHHH

SEQ ID NO: 6012 - protein, 244 aa, Artificial Sequence
  Description of Artificial Sequence: Synthetic polypeptide
MGILPSPGMPALLSLVSLLSVLLMGCVAETGTRFPNITNLCPFGEVFNATRFASVYAWNRKRISNCVADYSVLYNSASFSTFKCYGVSPTKLNDLCFTNVYADSFVIRGDEVRQIAPGQTGKIADYNYKLPDDFTGCVIAWNSNNLDSKIGGNYNYLYRLFRKSNLKPFERDISTEIYQAGSTPCNGVEGFNCYFPLQSYGFQPTNGVGYQPYRVVVLSFELLHAPATVCGPKKSTHHHHHHHH

SEQ ID NO: 6013 - protein, 244 aa, Artificial Sequence
  Description of Artificial Sequence: Synthetic polypeptide
MGILPSPGMPALLSLVSLLSVLLMGCVAETGTRFPNITNLCPFGEVFNATRFASVYAWNRKRISNCVADYSVLYNSASFSTFKCYGVSPTKLNDLCFTTVYADSFVIRGDEVRQIAPGQTGKIADYNYKLPDDFTGCVIAWNSNNLDSKVGGNYNYLYRLFRKSNLKPFERDISTEIYQAGSTPCNGVEGFNCYFPLQSYGFQPTNGVGYQPYRVVVLSFELLHAPATVCGPKKSTHHHHHHHH

SEQ ID NO: 6014 - protein, 244 aa, Artificial Sequence
  Description of Artificial Sequence: Synthetic polypeptide
MGILPSPGMPALLSLVSLLSVLLMGCVAETGTRFPNITNLCPFGEVFNATRFASVYAWNRKRISNCVADYSVLYNSASFSTFKCYGVSPTKLNDLCFTNVYADSFVIRGDEVRQIAPGQTGKIADYNYKLPDDFTGCVIAWNSNNLDSKVGGNYNYLYRLFRKSNLKPFERDISQEIYQAGSTPCNGVEGFNCYFPLQSYGFQPTNGVGYQPYRVVVLSFELLHAPATVCGPKKSTHHHHHHHH

SEQ ID NO: 6015 - protein, 244 aa, Artificial Sequence
  Description of Artificial Sequence: Synthetic polypeptide
MGILPSPGMPALLSLVSLLSVLLMGCVAETGTRFPNITNLCPFGEVFNATRFASVYAWNRKRISNCVADYSVLYNSASFSTFKCYGVSPTKLNDLCFTNVYADSFVIRGDEVRQIAPGQTGKIADYNYKLPDDFTGCVIAWNSNNLDSKVGGNYNYLYRLFRKSNLKPVERDISTEIYQAGSTPCNGVEGFNCYFPLQSYGFQPTNGVGYQPYRVVVLSFELLHAPATVCGPKKSTHHHHHHHH

SEQ ID NO: 6016 - protein, 244 aa, Artificial Sequence
  Description of Artificial Sequence: Synthetic polypeptide
MGILPSPGMPALLSLVSLLSVLLMGCVAETGTRFPNITNLCPFGEVFNATRFASVYAWNRKRISNCVADYSVLYNSASFSTFKCYGVSPTKLNDLCFTNVYADSFVIRGDEVRQIAPGQTGKIADYNYKLPDDFTGCVIAWNSNGLDSKVGGNYNYLYRLFRKSNLKPFERDISTEIYQAGSTPCNGVEGFNCYFPLQSYGFQPTNGVGYQPYRVVVLSFELLHAPATVCGPKKSTHHHHHHHH

SEQ ID NO: 6017 - protein, 244 aa, Artificial Sequence
  Description of Artificial Sequence: Synthetic polypeptide
MGILPSPGMPALLSLVSLLSVLLMGCVAETGTRFPNITNLCPFGEVFNATRFASVYAWNRKRISNCVADYSVLYNSASFSTFKCYGVSPTKLNDLCFTNVYADSFVIRGDEVRQIAPGQTGKIADYNYKLPDDFTGCVIAWNSNNLDSKVGGNYNYLYRLFRKSNLKPFERDISTEIYQAGSTPCTGVEGFNCYFPLQSYGFQPTNGVGYQPYRVVVLSFELLHAPATVCGPKKSTHHHHHHHH

SEQ ID NO: 6018 - protein, 244 aa, Artificial Sequence
  Description of Artificial Sequence: Synthetic polypeptide
MGILPSPGMPALLSLVSLLSVLLMGCVAETGTRFPNITNLCPFGEVFNATRFASVYAWNRKRISNCVADYSLLYNSASFSTFKCYGVSPTKLNDLCFTNVYADSFVIRGDEVRQIAPGQTGKIADYNYKLPDDFTGCVIAWNSNNLDSKVGGNYNYLYRLFRKSNLKPFERDISTEIYQAGSTPCNGVEGFNCYFPLQSYGFQPTNGVGYQPYRVVVLSFELLHAPATVCGPKKSTHHHHHHHH

SEQ ID NO: 6019 - protein, 244 aa, Artificial Sequence
  Description of Artificial Sequence: Synthetic polypeptide
MGILPSPGMPALLSLVSLLSVLLMGCVAETGTRFPNITNLCPFGEVFNATRFASVYAWNRKRISNCVADYSVLYNSASFSTFKCYGVSPTKLNDLCFTNVYADSFVIRGDEVRQIAPGQTGKIADYNYKLPDDFTGCVIAWNSNNLDSKVGGNYNYLYRLFRKSNLKPFERDISTEIYQAGSTPCNGVEGFNCYFPLQSYGFQPTNGVGYQPYRVVVLLFELLHAPATVCGPKKSTHHHHHHHH

SEQ ID NO: 6020 - protein, 244 aa, Artificial Sequence
  Description of Artificial Sequence: Synthetic polypeptide
MGILPSPGMPALLSLVSLLSVLLMGCVAETGTRFPNITNLCPFGEVFNATRFASVYAYNRKRISNCVADYSVLYNSASFSTFKCYGVSPTKLNDLCFTNVYADSFVIRGDEVRQIAPGQTGKIADYNYKLPDDFTGCVIAWNSNNLDSKVGGNYNYLYRLFRKSNLKPFERDISTEIYQAGSTPCNGVEGFNCYFPLQSYGFQPTNGVGYQPYRVVVLSFELLHAPATVCGPKKSTHHHHHHHH

SEQ ID NO: 6021 - protein, 244 aa, Artificial Sequence
  Description of Artificial Sequence: Synthetic polypeptide
MGILPSPGMPALLSLVSLLSVLLMGCVAETGTRFPNITNLCPFGEVFNATRFASVYAWNRKRISNCVADYSVLYNSASFSTFKCYGVSPTKLNDLCFTNVYADSFVIRGDEVRQIAPGQTGKIADYNYKLPDDFTGCVIAWNSNNLDSKVGGNYNYLYRLFRKSNLKPFERDISPEIYQAGSTPCNGVEGFNCYFPLQSYGFQPTNGVGYQPYRVVVLSFELLHAPATVCGPKKSTHHHHHHHH

SEQ ID NO: 6022 - protein, 244 aa, Artificial Sequence
  Description of Artificial Sequence: Synthetic polypeptide
MGILPSPGMPALLSLVSLLSVLLMGCVAETGTRFPNITNLCPFGEVFNATRFASVYAWNRKRISNCVADYSVLYNSASFSTFKCYGVSPTKLNDLCFTNVYADSFVIRGDELRQIAPGQTGKIADYNYKLPDDFTGCVIAWNSNNLDSKVGGNYNYLYRLFRKSNLKPFERDISTEIYQAGSTPCNGVEGFNCYFPLQSYGFQPTNGVGYQPYRVVVLSFELLHAPATVCGPKKSTHHHHHHHH

SEQ ID NO: 6023 - protein, 244 aa, Artificial Sequence
  Description of Artificial Sequence: Synthetic polypeptide
MGILPSPGMPALLSLVSLLSVLLMGCVAETGTRFPNITNLCPFGEVFNATRFASVYAWNRKRISNCVADYSVLYNSASFSTFKCYGVSPTKLNDLCFTNVYADSFVIRGDEVRQIAPGQTGKIADYNYKLPDDFTGCVIAWNSNNLDSKVGGNYNYLYRLFRKSNLKPFERDISTEIYQAGSTPCNGVEGFNCYFPLQSYGFQPTNGVGYQPYRVVVLQFELLHAPATVCGPKKSTHHHHHHHH

SEQ ID NO: 6024 - protein, 244 aa, Artificial Sequence
  Description of Artificial Sequence: Synthetic polypeptide
MGILPSPGMPALLSLVSLLSVLLMGCVAETGTRFPNITNLCPFGEVFNATRFVSVYAWNRKRISNCVADYSVLYNSASFSTFKCYGVSPTKLNDLCFTNVYADSFVIRGDEVRQIAPGQTGKIADYNYKLPDDFTGCVIAWNSNNLDSKVGGNYNYLYRLFRKSNLKPFERDISTEIYQAGSTPCNGVEGFNCYFPLQSYGFQPTNGVGYQPYRVVVLSFELLHAPATVCGPKKSTHHHHHHHH

SEQ ID NO: 6025 - protein, 244 aa, Artificial Sequence
  Description of Artificial Sequence: Synthetic polypeptide
MGILPSPGMPALLSLVSLLSVLLMGCVAETGTRFPNITNLCPFGEVFNATRFASVYAWNRKRISNCVADYSRLYNSASFSTFKCYGVSPTKLNDLCFTNVYADSFVIRGDEVRQIAPGQTGKIADYNYKLPDDFTGCVIAWNSNNLDSKVGGNYNYLYRLFRKSNLKPFERDISTEIYQAGSTPCNGVEGFNCYFPLQSYGFQPTNGVGYQPYRVVVLSFELLHAPATVCGPKKSTHHHHHHHH

SEQ ID NO: 6026 - protein, 244 aa, Artificial Sequence
  Description of Artificial Sequence: Synthetic polypeptide
MGILPSPGMPALLSLVSLLSVLLMGCVAETGTRFPNITNLCPFGEVFNATRFASVYAWNRKRISNCVADYSVLYNSASFSTFKCYGVSPTKLNDLCFTNVYADSFVIRGDEVRQIAPGQTGKIADYNYKLPDDFTGCVIAWNSNNLDSKVGGNYNYLYRLFRKSNLKPFERDISTEIYQAGSTPCNGVEGFNEYFPLQSYGFQPTNGVGYQPYRVVVLSFELLHAPATVCGPKKSTHHHHHHHH

SEQ ID NO: 6027 - protein, 244 aa, Artificial Sequence
  Description of Artificial Sequence: Synthetic polypeptide
MGILPSPGMPALLSLVSLLSVLLMGCVAETGTRFPNITNLCPFGEVFNATRFASVYAWNRKRISNCVADYSVLYNSASFSTFKCYGVSPTKLNDLCFTNVYADSFVIRGDEVRQIAPGQTGKIADYNYKLPDDFTGCVIAWNSNNLDSKVGGNYNYLRRLFRKSNLKPFERDISTEIYQAGSTPCNGVEGFNCYFPLQSYGFQPTNGVGYQPYRVVVLSFELLHAPATVCGPKKSTHHHHHHHH

SEQ ID NO: 6028 - protein, 244 aa, Artificial Sequence
  Description of Artificial Sequence: Synthetic polypeptide
MGILPSPGMPALLSLVSLLSVLLMGCVAETGTRFPNITNLCPFGEVFNATRFASVYAWNRKRISNCVADYSVLYNSASFSTFKCYGVSPTKLNDLCFTNVYADSFVIRGDEVRQIAPGQTGKIADYNYKLPDDFTGCVIAWNSDNLDSKVGGNYNYLYRLFRKSNLKPFERDISTEIYQAGSTPCNGVEGFNCYFPLQSYGFQPTNGVGYQPYRVVVLSFELLHAPATVCGPKKSTHHHHHHHH

SEQ ID NO: 6029 - protein, 244 aa, Artificial Sequence
  Description of Artificial Sequence: Synthetic polypeptide
MGILPSPGMPALLSLVSLLSVLLMGCVAETGTRFPNITNLCPFGEVFNATRFASVYAWNRKRISNCVADYSVLYNSASFSTFKCYGVSPTKLNDLCFTNVYADSFVIRGDEVRQIAPGQTGKIADYNYKLPDDFTGCVIAWNSNQLDSKVGGNYNYLYRLFRKSNLKPFERDISTEIYQAGSTPCNGVEGFNCYFPLQSYGFQPTNGVGYQPYRVVVLSFELLHAPATVCGPKKSTHHHHHHHH

SEQ ID NO: 6030 - protein, 244 aa, Artificial Sequence
  Description of Artificial Sequence: Synthetic polypeptide
MGILPSPGMPALLSLVSLLSVLLMGCVAETGTRFPNITNLCPFGEVFNATRFSSVYAWNRKRISNCVADYSVLYNSASFSTFKCYGVSPTKLNDLCFTNVYADSFVIRGDEVRQIAPGQTGKIADYNYKLPDDFTGCVIAWNSNNLDSKVGGNYNYLYRLFRKSNLKPFERDISTEIYQAGSTPCNGVEGFNCYFPLQSYGFQPTNGVGYQPYRVVVLSFELLHAPATVCGPKKSTHHHHHHHH

SEQ ID NO: 6031 - protein, 244 aa, Artificial Sequence
  Description of Artificial Sequence: Synthetic polypeptide
MGILPSPGMPALLSLVSLLSVLLMGCVAETGTRFPNITNLCPFGEVFNATRFASVYAWNRKRISNCVADYSVLYNSASFSTFKCYGVSPTKLNDLCFTNVYADSFVIRGDEVRQIAPGQTGKIADYNYNLPDDFTGCVIAWNSNNLDSKVGGNYNYLYRLFRKSNLKPFERDISTEIYQAGSTPCNGVEGFNCYFPLQSYGFQPTNGVGYQPYRVVVLSFELLHAPATVCGPKKSTHHHHHHHH

SEQ ID NO: 6032 - protein, 244 aa, Artificial Sequence
  Description of Artificial Sequence: Synthetic polypeptide
MGILPSPGMPALLSLVSLLSVLLMGCVAETGTRFPNITNLCPFGEVFNATRFASVYAWNRKRISNCKADYSVLYNSASFSTFKCYGVSPTKLNDLCFTNVYADSFVIRGDEVRQIAPGQTGKIADYNYKLPDDFTGCVIAWNSNNLDSKVGGNYNYLYRLFRKSNLKPFERDISTEIYQAGSTPCNGVEGFNCYFPLQSYGFQPTNGVGYQPYRVVVLSFELLHAPATVCGPKKSTHHHHHHHH

SEQ ID NO: 6033 - protein, 244 aa, Artificial Sequence
  Description of Artificial Sequence: Synthetic polypeptide
MGILPSPGMPALLSLVSLLSVLLMGCVAETGTRFPNITNLCPFGEVFNATRFASVYAWNRKRISNCVADYSVLYNSASFSTFKCYGVSPTKLNDLCFTNVYADSFVIRGDEVRQIAPGQTGKIADYNYKLPDDFTGCVIAWNSNNLDSKVGGNYNYLYRLFRKSNLKPFERDIKTEIYQAGSTPCNGVEGFNCYFPLQSYGFQPTNGVGYQPYRVVVLSFELLHAPATVCGPKKSTHHHHHHHH

SEQ ID NO: 6034 - protein, 244 aa, Artificial Sequence
  Description of Artificial Sequence: Synthetic polypeptide
MGILPSPGMPALLSLVSLLSVLLMGCVAETGTRFPNITNLCPFGEVFNATRFASVYAWNRKRISNCVADYSVLYNSASFSTFKCYGVSPTKLNDLCFTNVYADLFVIRGDEVRQIAPGQTGKIADYNYKLPDDFTGCVIAWNSNNLDSKVGGNYNYLYRLFRKSNLKPFERDISTEIYQAGSTPCNGVEGFNCYFPLQSYGFQPTNGVGYQPYRVVVLSFELLHAPATVCGPKKSTHHHHHHHH

SEQ ID NO: 6035 - protein, 244 aa, Artificial Sequence
  Description of Artificial Sequence: Synthetic polypeptide
MGILPSPGMPALLSLVSLLSVLLMGCVAETGTRFPNITNLCPFGEVFNATRFASVYAWNRKRISNCVADYSVLYNSASFSTFKCYGVSPTKLNDLCFTNVYADSFVIRGDEVRQIAPGQTGKIADYNYKLPDDFTGCVIAWNSNNLDSKVGGNYNYLYRLFRKSNLSPFERDISTEIYQAGSTPCNGVEGFNCYFPLQSYGFQPTNGVGYQPYRVVVLSFELLHAPATVCGPKKSTHHHHHHHH

SEQ ID NO: 6036 - protein, 244 aa, Artificial Sequence
  Description of Artificial Sequence: Synthetic polypeptide
MGILPSPGMPALLSLVSLLSVLLMGCVAETGTRFPNITNLCPFGEVFNATRFASVYAWNRKRISNCVADYSVLYNSASFSTFKCYGVSPTKLNDLNFTNVYADSFVIRGDEVRQIAPGQTGKIADYNYKLPDDFTGCVIAWNSNNLDSKVGGNYNYLYRLFRKSNLKPFERDISTEIYQAGSTPCNGVEGFNCYFPLQSYGFQPTNGVGYQPYRVVVLSFELLHAPATVCGPKKSTHHHHHHHH

SEQ ID NO: 6037 - protein, 244 aa, Artificial Sequence
  Description of Artificial Sequence: Synthetic polypeptide
MGILPSPGMPALLSLVSLLSVLLMGCVAETGTRFPNITNLCPFGEVFNATRFASVYAFNRKRISNCVADYSVLYNSASFSTFKCYGVSPTKLNDLCFTNVYADSFVIRGDEVRQIAPGQTGKIADYNYKLPDDFTGCVIAWNSNNLDSKVGGNYNYLYRLFRKSNLKPFERDISTEIYQAGSTPCNGVEGFNCYFPLQSYGFQPTNGVGYQPYRVVVLSFELLHAPATVCGPKKSTHHHHHHHH

SEQ ID NO: 6038 - protein, 244 aa, Artificial Sequence
  Description of Artificial Sequence: Synthetic polypeptide
MGILPSPGMPALLSLVSLLSVLLMGCVAETGTRFPNITNLCPFGEVFNATRFASVYAWNRKRISNCVADYSVLYNSASFSTFKCYGVSPTKLNDLCFTNVYADSFVIRGDEVRQIAPGQTGKIADYNYKLPDDFTGCVIAWNSNNLDSKVGGNYNYLYRLFRKSNLKPFERDISTCIYQAGSTPCNGVEGFNCYFPLQSYGFQPTNGVGYQPYRVVVLSFELLHAPATVCGPKKSTHHHHHHHH

SEQ ID NO: 6039 - protein, 244 aa, Artificial Sequence
  Description of Artificial Sequence: Synthetic polypeptide
MGILPSPGMPALLSLVSLLSVLLMGCVAETGTRFPNITNLCPFGEVFNATRFASVYAWNRKRISNCVADYSVLYNSASFSTFKCYGVSPTKLNDLCFTNVYADSFVIRGDEVRQIAPGQTGKIADYNYKLPDDFTGCVIAWNSNNLDSKVGGNYNYLYRLFRKSNLKPFERDISTEIYQAGSTPANGVEGFNCYFPLQSYGFQPTNGVGYQPYRVVVLSFELLHAPATVCGPKKSTHHHHHHHH

SEQ ID NO: 6040 - protein, 244 aa, Artificial Sequence
  Description of Artificial Sequence: Synthetic polypeptide
MGILPSPGMPALLSLVSLLSVLLMGCVAETGTRFPNITNLCPFGEVFNATRFASVYAWNRKRISNCVADYSVLYDSASFSTFKCYGVSPTKLNDLCFTNVYADSFVIRGDEVRQIAPGQTGKIADYNYKLPDDFTGCVIAWNSNNLDSKVGGNYNYLYRLFRKSNLKPFERDISTEIYQAGSTPCNGVEGFNCYFPLQSYGFQPTNGVGYQPYRVVVLSFELLHAPATVCGPKKSTHHHHHHHH

SEQ ID NO: 6041 - protein, 244 aa, Artificial Sequence
  Description of Artificial Sequence: Synthetic polypeptide
MGILPSPGMPALLSLVSLLSVLLMGCVAETGTRFPNITNLCPFGEVFNATRFASVYAWNRKRISNCVADYSVLYNSASFSTFKCYGVSPTKLNDLCFTNVYADSFVIRGDEVRQIAPGQTGKIADYNYKLPDDFTGCVIAWNSNNLDSKAGGNYNYLYRLFRKSNLKPFERDISTEIYQAGSTPCNGVEGFNCYFPLQSYGFQPTNGVGYQPYRVVVLSFELLHAPATVCGPKKSTHHHHHHHH

SEQ ID NO: 6042 - protein, 244 aa, Artificial Sequence
  Description of Artificial Sequence: Synthetic polypeptide
MGILPSPGMPALLSLVSLLSVLLMGCVAETGTRFPNITNLCPFGEVFNATRFASVYAWNRKRISNCVADYSVLYKSASFSTFKCYGVSPTKLNDLCFTNVYADSFVIRGDEVRQIAPGQTGKIADYNYKLPDDFTGCVIAWNSNNLDSKVGGNYNYLYRLFRKSNLKPFERDISTEIYQAGSTPCNGVEGFNCYFPLQSYGFQPTNGVGYQPYRVVVLSFELLHAPATVCGPKKSTHHHHHHHH

SEQ ID NO: 6043 - protein, 244 aa, Artificial Sequence
  Description of Artificial Sequence: Synthetic polypeptide
MGILPSPGMPALLSLVSLLSVLLMGCVAETGTRFPNITNLCPFGEVFNATRFASVYAWNRKRISNCVADYSKLYNSASFSTFKCYGVSPTKLNDLCFTNVYADSFVIRGDEVRQIAPGQTGKIADYNYKLPDDFTGCVIAWNSNNLDSKVGGNYNYLYRLFRKSNLKPFERDISTEIYQAGSTPCNGVEGFNCYFPLQSYGFQPTNGVGYQPYRVVVLSFELLHAPATVCGPKKSTHHHHHHHH

SEQ ID NO: 6044 - protein, 244 aa, Artificial Sequence
  Description of Artificial Sequence: Synthetic polypeptide
MGILPSPGMPALLSLVSLLSVLLMGCVAETGTRFPNITNLCPFGEVFNATRFASVYAWNRKRISNCSADYSVLYNSASFSTFKCYGVSPTKLNDLCFTNVYADSFVIRGDEVRQIAPGQTGKIADYNYKLPDDFTGCVIAWNSNNLDSKVGGNYNYLYRLFRKSNLKPFERDISTEIYQAGSTPCNGVEGFNCYFPLQSYGFQPTNGVGYQPYRVVVLSFELLHAPATVCGPKKSTHHHHHHHH

SEQ ID NO: 6045 - protein, 244 aa, Artificial Sequence
  Description of Artificial Sequence: Synthetic polypeptide
MGILPSPGMPALLSLVSLLSVLLMGCVAETGTRFPNITNLCPFGEVFNATRFPSVYAWNRKRISNCVADYSVLYNSASFSTFKCYGVSPTKLNDLCFTNVYADSFVIRGDEVRQIAPGQTGKIADYNYKLPDDFTGCVIAWNSNNLDSKVGGNYNYLYRLFRKSNLKPFERDISTEIYQAGSTPCNGVEGFNCYFPLQSYGFQPTNGVGYQPYRVVVLSFELLHAPATVCGPKKSTHHHHHHHH

SEQ ID NO: 6046 - protein, 244 aa, Artificial Sequence
  Description of Artificial Sequence: Synthetic polypeptide
MGILPSPGMPALLSLVSLLSVLLMGCVAETGTRFPNITNLCPFGEVFNATRFASVYAWNRKRISNCVADYSVLYNSASFSTFKCYGVSPTKLNDLCFTNVYADSFVIRGDEVRQIAPGQTGKIADYNYKLPDDFTGCVIAWNSNNLDSKVGGNYNYLYRLFRKSNLKPFESDISTEIYQAGSTPCNGVEGFNCYFPLQSYGFQPTNGVGYQPYRVVVLSFELLHAPATVCGPKKSTHHHHHHHH

SEQ ID NO: 6047 - protein, 244 aa, Artificial Sequence
  Description of Artificial Sequence: Synthetic polypeptide
MGILPSPGMPALLSLVSLLSVLLMGCVAETGTRFPNITNLCPFGEVFNATRFASVYAWNRKRISNCVADYSVLYNSASFSTFKCYGVSPTKLNDLCFTNVYADSFVIRGDEVRQIAPGQTGKIADYNYKLPDDFTGCVIAWNSNNLDSKVGGNYNYLYRLFRKSNLKPFERDISFEIYQAGSTPCNGVEGFNCYFPLQSYGFQPTNGVGYQPYRVVVLSFELLHAPATVCGPKKSTHHHHHHHH

SEQ ID NO: 6048 - protein, 244 aa, Artificial Sequence
  Description of Artificial Sequence: Synthetic polypeptide
MGILPSPGMPALLSLVSLLSVLLMGCVAETGTRFPNITNLCPFGEVFNATRFASVYAWNRKRISNCVANYSVLYNSASFSTFKCYGVSPTKLNDLCFTNVYADSFVIRGDEVRQIAPGQTGKIADYNYKLPDDFTGCVIAWNSNNLDSKVGGNYNYLYRLFRKSNLKPFERDISTEIYQAGSTPCNGVEGFNCYFPLQSYGFQPTNGVGYQPYRVVVLSFELLHAPATVCGPKKSTHHHHHHHH

SEQ ID NO: 6049 - protein, 244 aa, Artificial Sequence
  Description of Artificial Sequence: Synthetic polypeptide
MGILPSPGMPALLSLVSLLSVLLMGCVAETGTRFPNITNLCPFGEVFNATRFASVYAWNRKRISNCVADYSVLYNSASFSTFKCYGVSPTKLNDLCFTNVYADSFVIRGDEVRQIAPGQTGKIADYNYKLPDDFTGCVIAWNSNNLDSKVGGNYNYLYRLFRKSNLKPFERDISTEFYQAGSTPCNGVEGFNCYFPLQSYGFQPTNGVGYQPYRVVVLSFELLHAPATVCGPKKSTHHHHHHHH

SEQ ID NO: 6050 - protein, 244 aa, Artificial Sequence
  Description of Artificial Sequence: Synthetic polypeptide
MGILPSPGMPALLSLVSLLSVLLMGCVAETGTRFPNITNLCPFGEVFNATRFASVYAWNRKRISNCVADYSVLYNSASFSTFKCYGVSPTKLNDLCFTNVYADSFVIRGDEVRQIAPGQTGKIADYNYKLPDDFTGCVIAWNSNNLDSKNGGNYNYLYRLFRKSNLKPFERDISTEIYQAGSTPCNGVEGFNCYFPLQSYGFQPTNGVGYQPYRVVVLSFELLHAPATVCGPKKSTHHHHHHHH

SEQ ID NO: 6051 - protein, 244 aa, Artificial Sequence
  Description of Artificial Sequence: Synthetic polypeptide
MGILPSPGMPALLSLVSLLSVLLMGCVAETGTRFPNITNLCPFGEVFNATRFASVYAWNRKRISNCVADYSVLYNSASFSTFKCYGVSPTKLNDLCFTNVYADSFVIRGDEVRQIAPGQTGKIADYNYKLPDDFTGCVIAWNSNNLDSKVGGNYNYLYRLFRKSNLKPFERDISTMIYQAGSTPCNGVEGFNCYFPLQSYGFQPTNGVGYQPYRVVVLSFELLHAPATVCGPKKSTHHHHHHHH

SEQ ID NO: 6052 - protein, 244 aa, Artificial Sequence
  Description of Artificial Sequence: Synthetic polypeptide
MGILPSPGMPALLSLVSLLSVLLMGCVAETGTRFPNVTNLCPFGEVFNATRFASVYAWNRKRISNCVADYSVLYNSASFSTFKCYGVSPTKLNDLCFTNVYADSFVIRGDEVRQIAPGQTGKIADYNYKLPDDFTGCVIAWNSNNLDSKVGGNYNYLYRLFRKSNLKPFERDISTEIYQAGSTPCNGVEGFNCYFPLQSYGFQPTNGVGYQPYRVVVLSFELLHAPATVCGPKKSTHHHHHHHH

SEQ ID NO: 6053 - protein, 244 aa, Artificial Sequence
  Description of Artificial Sequence: Synthetic polypeptide
MGILPSPGMPALLSLVSLLSVLLMGCVAETGTRFPNITNLCPFGEVFNATRFASVYAWNRKRISNCVADYSVLYNSASFSTFKCYGVSPTKLNDLCWTNVYADSFVIRGDEVRQIAPGQTGKIADYNYKLPDDFTGCVIAWNSNNLDSKVGGNYNYLYRLFRKSNLKPFERDISTEIYQAGSTPCNGVEGFNCYFPLQSYGFQPTNGVGYQPYRVVVLSFELLHAPATVCGPKKSTHHHHHHHH

SEQ ID NO: 6054 - protein, 244 aa, Artificial Sequence
  Description of Artificial Sequence: Synthetic polypeptide
MGILPSPGMPALLSLVSLLSVLLMGCVAETGTRFPNITNLCPFGEVFNATRFASVYAWNRKRISNCVADYSVLYNSASFSTFKCYGVSPTKLNDLCFTNVYADSFVIRGDEVRQIAPGQTGKIADYNYTLPDDFTGCVIAWNSNNLDSKVGGNYNYLYRLFRKSNLKPFERDISTEIYQAGSTPCNGVEGFNCYFPLQSYGFQPTNGVGYQPYRVVVLSFELLHAPATVCGPKKSTHHHHHHHH

SEQ ID NO: 6055 - protein, 244 aa, Artificial Sequence
  Description of Artificial Sequence: Synthetic polypeptide
MGILPSPGMPALLSLVSLLSVLLMGCVAETGTRFPNITNLCPFGEVFNATRFASVYAWNRKRISNCYADYSVLYNSASFSTFKCYGVSPTKLNDLCFTNVYADSFVIRGDEVRQIAPGQTGKIADYNYKLPDDFTGCVIAWNSNNLDSKVGGNYNYLYRLFRKSNLKPFERDISTEIYQAGSTPCNGVEGFNCYFPLQSYGFQPTNGVGYQPYRVVVLSFELLHAPATVCGPKKSTHHHHHHHH

SEQ ID NO: 6056 - protein, 244 aa, Artificial Sequence
  Description of Artificial Sequence: Synthetic polypeptide
MGILPSPGMPALLSLVSLLSVLLMGCVAETGTRFPNITNLCPFGEVFNATRFASVYAWNRKRISNCVADYSVLYNSASFSTFKCYGVSPTKLNDLCFTNVYADSFVIRGDEVRQIAPGQTGKIADYNYKLPDDFTGCVIAWNSNNLDSKVGGNYNYLYRLFRKSNLKPFERDISTEIYQAGSTPCNGVEGFNCYFPLQSYGFQPTNGVGYQPYRVVVLSFELLHYPATVCGPKKSTHHHHHHHH

SEQ ID NO: 6057 - protein, 244 aa, Artificial Sequence
  Description of Artificial Sequence: Synthetic polypeptide
MGILPSPGMPALLSLVSLLSVLLMGCVAETGTRFPNITNLCPFGEVFNATRFASVYAWNRKRISNCVADYSVLYNSASFSTFKCYGVSPTKLNDLCFTNVYADSFVIRGDEVRQIAPGQTGKIADYNYKLPDDFTGCVIAWNSNNLDSKVGGNYNYLYRLFRKSNLKPFERDISTEIYQAGSTPCNGVEGFNCYFPLQSYGFQPTNGVGYQPYRVVVLKFELLHAPATVCGPKKSTHHHHHHHH

SEQ ID NO: 6058 - protein, 244 aa, Artificial Sequence
  Description of Artificial Sequence: Synthetic polypeptide
MGILPSPGMPALLSLVSLLSVLLMGCVAETGTRFPNITNLCPFGEVFNATRFASVYAWNRKRISNCVADYSVLYNSASFSTFKCYGVSPTKLNDLCFTNVYADSFVIRGDEVRQIAPGQTGKIADYNYKLPDDFTGCVIAWNSNNLDSKVGGNYNYLYRLFRKSNLKPFERDISTEIYQAGSTPCNGVEGFNCYFPLQSYSFQPTNGVGYQPYRVVVLSFELLHAPATVCGPKKSTHHHHHHHH

SEQ ID NO: 6059 - protein, 244 aa, Artificial Sequence
  Description of Artificial Sequence: Synthetic polypeptide
MGILPSPGMPALLSLVSLLSVLLMGCVAETGTRFPNITNLCPFGEVFNATRFASVYAWNRKRISNCVADYSVLYNSASFSTFKCYGVSPTKLNDLCFTNVYADSFVIRGDEIRQIAPGQTGKIADYNYKLPDDFTGCVIAWNSNNLDSKVGGNYNYLYRLFRKSNLKPFERDISTEIYQAGSTPCNGVEGFNCYFPLQSYGFQPTNGVGYQPYRVVVLSFELLHAPATVCGPKKSTHHHHHHHH

SEQ ID NO: 6060 - protein, 244 aa, Artificial Sequence
  Description of Artificial Sequence: Synthetic polypeptide
MGILPSPGMPALLSLVSLLSVLLMGCVAETGTRFPNITNLCPFGEVFNATRFASVAAWNRKRISNCVADYSVLYNSASFSTFKCYGVSPTKLNDLCFTNVYADSFVIRGDEVRQIAPGQTGKIADYNYKLPDDFTGCVIAWNSNNLDSKVGGNYNYLYRLFRKSNLKPFERDISTEIYQAGSTPCNGVEGFNCYFPLQSYGFQPTNGVGYQPYRVVVLSFELLHAPATVCGPKKSTHHHHHHHH

SEQ ID NO: 6061 - protein, 244 aa, Artificial Sequence
  Description of Artificial Sequence: Synthetic polypeptide
MGILPSPGMPALLSLVSLLSVLLMGCVAETGTRFPNITNLCPFGEVFNATRFASVYAWNRKRISNCQADYSVLYNSASFSTFKCYGVSPTKLNDLCFTNVYADSFVIRGDEVRQIAPGQTGKIADYNYKLPDDFTGCVIAWNSNNLDSKVGGNYNYLYRLFRKSNLKPFERDISTEIYQAGSTPCNGVEGFNCYFPLQSYGFQPTNGVGYQPYRVVVLSFELLHAPATVCGPKKSTHHHHHHHH

SEQ ID NO: 6062 - protein, 244 aa, Artificial Sequence
  Description of Artificial Sequence: Synthetic polypeptide
MGILPSPGMPALLSLVSLLSVLLMGCVAETGTRFPNITNLCPFGEVFNATRFASVYAWNRKRISNCVADYSVLYNSASFSTFKCYGVSPTKLNDLCFTNVYADSFVIRGDEVRQIAPGQTGKIADYNYKLPDDFTGCVIAWNSNNLDSKVGGNYNYLYRLFRKSNLKPFSRDISTEIYQAGSTPCNGVEGFNCYFPLQSYGFQPTNGVGYQPYRVVVLSFELLHAPATVCGPKKSTHHHHHHHH

SEQ ID NO: 6063 - protein, 244 aa, Artificial Sequence
  Description of Artificial Sequence: Synthetic polypeptide
MGILPSPGMPALLSLVSLLSVLLMGCVAETGTRFPNITNLCPFGEVFNATRFASVYAWNRKRISNCVADYSVLYNSASFSTFKCYGVSPTKLNDLCFTNVYADSFVIRGDEVRQIAPGQTGKIADYNYKLPDDFTGCVIAWNSNNLDSKVGGNYNYLYRLFRKSNLKPFERDISREIYQAGSTPCNGVEGFNCYFPLQSYGFQPTNGVGYQPYRVVVLSFELLHAPATVCGPKKSTHHHHHHHH

SEQ ID NO: 6064 - protein, 244 aa, Artificial Sequence
  Description of Artificial Sequence: Synthetic polypeptide
MGILPSPGMPALLSLVSLLSVLLMGCVAETGTRFPNITNLCPFGEVFNATRFASVYAWNRKRISNCVADYSVLYNSASFSTFKCYGVSPTKLNDLCFTNVYADSFVIRGDEVRQIAPGQTGKIADYNYKLPDDFTGCVIAWNSNNLDSKVGGNYNYLYRLFRKSNLKPFERDISTEIYQAGSTPCNGVEGFNCYFPLQSYGFQPTNGVGYQPYRVVVLSFELLPAPATVCGPKKSTHHHHHHHH

SEQ ID NO: 6065 - protein, 244 aa, Artificial Sequence
  Description of Artificial Sequence: Synthetic polypeptide
MGILPSPGMPALLSLVSLLSVLLMGCVAETGTRFPNITNLCPFGEVFNATRFASVYAWNRKRISNCVADYSSLYNSASFSTFKCYGVSPTKLNDLCFTNVYADSFVIRGDEVRQIAPGQTGKIADYNYKLPDDFTGCVIAWNSNNLDSKVGGNYNYLYRLFRKSNLKPFERDISTEIYQAGSTPCNGVEGFNCYFPLQSYGFQPTNGVGYQPYRVVVLSFELLHAPATVCGPKKSTHHHHHHHH

SEQ ID NO: 6066 - protein, 244 aa, Artificial Sequence
  Description of Artificial Sequence: Synthetic polypeptide
MGILPSPGMPALLSLVSLLSVLLMGCVAETGTRFPNITNLCPIGEVFNATRFASVYAWNRKRISNCVADYSVLYNSASFSTFKCYGVSPTKLNDLCFTNVYADSFVIRGDEVRQIAPGQTGKIADYNYKLPDDFTGCVIAWNSNNLDSKVGGNYNYLYRLFRKSNLKPFERDISTEIYQAGSTPCNGVEGFNCYFPLQSYGFQPTNGVGYQPYRVVVLSFELLHAPATVCGPKKSTHHHHHHHH

SEQ ID NO: 6067 - protein, 244 aa, Artificial Sequence
  Description of Artificial Sequence: Synthetic polypeptide
MGILPSPGMPALLSLVSLLSVLLMGCVAETGTRFPNITNLCPFGEVFNATRFASVYAWNRKRISNCVADISVLYNSASFSTFKCYGVSPTKLNDLCFTNVYADSFVIRGDEVRQIAPGQTGKIADYNYKLPDDFTGCVIAWNSNNLDSKVGGNYNYLYRLFRKSNLKPFERDISTEIYQAGSTPCNGVEGFNCYFPLQSYGFQPTNGVGYQPYRVVVLSFELLHAPATVCGPKKSTHHHHHHHH

SEQ ID NO: 6068 - protein, 244 aa, Artificial Sequence
  Description of Artificial Sequence: Synthetic polypeptide
MGILPSPGMPALLSLVSLLSVLLMGCVAETGTRFPNITNLCPFGEVFNATRFASVYAWNRKRISNCVADYSELYNSASFSTFKCYGVSPTKLNDLCFTNVYADSFVIRGDEVRQIAPGQTGKIADYNYKLPDDFTGCVIAWNSNNLDSKVGGNYNYLYRLFRKSNLKPFERDISTEIYQAGSTPCNGVEGFNCYFPLQSYGFQPTNGVGYQPYRVVVLSFELLHAPATVCGPKKSTHHHHHHHH

SEQ ID NO: 6069 - protein, 244 aa, Artificial Sequence
  Description of Artificial Sequence: Synthetic polypeptide
MGILPSPGMPALLSLVSLLSVLLMGCVAETGTRFPNITNLCPFGEVFNATRFASVYAWNRKRISNCVADYSVLYNSASFSTFKCYGVSPTKLNDLCFTNVYADSFVIRGDEVRQIAPGQTGKIADYNYKLPDDFTGCVIAWNSNNLDSKVGGNYNYLYRLFRKSNLKPFERDISTEIYQAGSTPCNGVEGFNCYFPLQSYGFQPTNGVGYQPYRVVVLSFELVHAPATVCGPKKSTHHHHHHHH

SEQ ID NO: 6070 - protein, 244 aa, Artificial Sequence
  Description of Artificial Sequence: Synthetic polypeptide
MGILPSPGMPALLSLVSLLSVLLMGCVAETGTRFPNITNLCPFGEVFNATRFASVYAWNRKRISNCVWDYSVLYNSASFSTFKCYGVSPTKLNDLCFTNVYADSFVIRGDEVRQIAPGQTGKIADYNYKLPDDFTGCVIAWNSNNLDSKVGGNYNYLYRLFRKSNLKPFERDISTEIYQAGSTPCNGVEGFNCYFPLQSYGFQPTNGVGYQPYRVVVLSFELLHAPATVCGPKKSTHHHHHHHH

SEQ ID NO: 6071 - protein, 244 aa, Artificial Sequence
  Description of Artificial Sequence: Synthetic polypeptide
MGILPSPGMPALLSLVSLLSVLLMGCVAETGTRFPNITNLCPFGEVFNATRFASVYQWNRKRISNCVADYSVLYNSASFSTFKCYGVSPTKLNDLCFTNVYADSFVIRGDEVRQIAPGQTGKIADYNYKLPDDFTGCVIAWNSNNLDSKVGGNYNYLYRLFRKSNLKPFERDISTEIYQAGSTPCNGVEGFNCYFPLQSYGFQPTNGVGYQPYRVVVLSFELLHAPATVCGPKKSTHHHHHHHH

SEQ ID NO: 6072 - protein, 244 aa, Artificial Sequence
  Description of Artificial Sequence: Synthetic polypeptide
MGILPSPGMPALLSLVSLLSVLLMGCVAETGTRFPNITNLCPFGEVFNATRFASVYAWNRKRISNCVADYSVLYNSASFSTFKCYGVSPTKLNDLCFTNVYADSFVIRGDHVRQIAPGQTGKIADYNYKLPDDFTGCVIAWNSNNLDSKVGGNYNYLYRLFRKSNLKPFERDISTEIYQAGSTPCNGVEGFNCYFPLQSYGFQPTNGVGYQPYRVVVLSFELLHAPATVCGPKKSTHHHHHHHH

SEQ ID NO: 6073 - protein, 244 aa, Artificial Sequence
  Description of Artificial Sequence: Synthetic polypeptide
MGILPSPGMPALLSLVSLLSVLLMGCVAETGTRFPNITNLCPFGEVFNATRFASVYAWNRKRISNCVADYSVLYNSASFSTFKCYGVSPTKLNDLCFTNVYADSFVIRGDEVRQIAPGQTGKIADYNYKLPDDFTGCVIAWNSNNLDSKVGGNYNYLYRLFRKSNLKPFERDISTEIYQAGSTPCNGVEGFNCYFPLQSYGFQPTNGVGYQPYRVVVLSFELKHAPATVCGPKKSTHHHHHHHH

SEQ ID NO: 6074 - protein, 244 aa, Artificial Sequence
  Description of Artificial Sequence: Synthetic polypeptide
MGILPSPGMPALLSLVSLLSVLLMGCVAETGTRFPNITNLCPFGEVFNATRFASVYAWNRKRISNCVADYSVLYNSASFSTFKCYGVSPTKLNDLCFTNVYADSFVIRGDEVRQIAPGQTGKIADYNYKLPDDFTGCVIAWNSNNLDSKVGGNYNYLYRLFRKSNLKPFELDISTEIYQAGSTPCNGVEGFNCYFPLQSYGFQPTNGVGYQPYRVVVLSFELLHAPATVCGPKKSTHHHHHHHH

SEQ ID NO: 6075 - protein, 244 aa, Artificial Sequence
  Description of Artificial Sequence: Synthetic polypeptide
MGILPSPGMPALLSLVSLLSVLLMGCVAETGTRFPNITNLCPFGEVFNATRFASVYAWNRKRISNCVADYSVLYNSASFSTFKCYGVSPTKLNDLCFTNVYADSFVIRGDEVRQIAPGQTGKIADYNYKLPDDFTGCVIAWNSNNLDSKVGGNYNYLYRLFRKSNLKPFERDISWEIYQAGSTPCNGVEGFNCYFPLQSYGFQPTNGVGYQPYRVVVLSFELLHAPATVCGPKKSTHHHHHHHH

SEQ ID NO: 6076 - protein, 244 aa, Artificial Sequence
  Description of Artificial Sequence: Synthetic polypeptide
MGILPSPGMPALLSLVSLLSVLLMGCVAETGTRFPNITNLCPFGEVFNATRFASVYAWNRKRISNCVADYSVLYNSASFSTFKCYGVSPTKLNDLCATNVYADSFVIRGDEVRQIAPGQTGKIADYNYKLPDDFTGCVIAWNSNNLDSKVGGNYNYLYRLFRKSNLKPFERDISTEIYQAGSTPCNGVEGFNCYFPLQSYGFQPTNGVGYQPYRVVVLSFELLHAPATVCGPKKSTHHHHHHHH

SEQ ID NO: 6077 - protein, 244 aa, Artificial Sequence
  Description of Artificial Sequence: Synthetic polypeptide
MGILPSPGMPALLSLVSLLSVLLMGCVAETGTRFPNITNLCPFGEVFNATRFASVYAWNRKRISNCVADYSVLYNSASFSTFKCYGVSPTKLNDLCFTNVYADSFVIRGDEVRQIAPGQTGKIADYNYKLPDDFTGCVIAWNSNNLDSKVGGNYNYLYRLFRKSNLKPFERDISTEIYQAGSTPCNGVEGFNCYFPLQSYGFQPTNGVGYQPYRVVVLIFELLHAPATVCGPKKSTHHHHHHHH

SEQ ID NO: 6078 - protein, 244 aa, Artificial Sequence
  Description of Artificial Sequence: Synthetic polypeptide
MGILPSPGMPALLSLVSLLSVLLMGCVAETGTRFPNITNLCPFGEVFNATRFASVYAWNRKRISNCVADYSVLYNSASFSTFKCYGVSPTKLNDLCFTNVYADSFVIRGDEVRQIAPGQTGKIADYNYKLPDDFTGCVIAWNSNNLDSKVGGNYNYLYRLFRKSNLKPFERDISTEIYQAGSTPCNGVEGFNCYFPLQSYVFQPTNGVGYQPYRVVVLSFELLHAPATVCGPKKSTHHHHHHHH

SEQ ID NO: 6079 - protein, 244 aa, Artificial Sequence
  Description of Artificial Sequence: Synthetic polypeptide
MGILPSPGMPALLSLVSLLSVLLMGCVAETGTRFPNITNLCPFGEVFNATRFASVYAWNRKRISNCVADYSVLYNSASFSTFKCYGVSPTKLNDLCFTNVYADSFVIRGDEVRQIAPGQTGKIADYNYKLPDDFTGCVFAWNSNNLDSKVGGNYNYLYRLFRKSNLKPFERDISTEIYQAGSTPCNGVEGFNCYFPLQSYGFQPTNGVGYQPYRVVVLSFELLHAPATVCGPKKSTHHHHHHHH

SEQ ID NO: 6080 - protein, 244 aa, Artificial Sequence
  Description of Artificial Sequence: Synthetic polypeptide
MGILPSPGMPALLSLVSLLSVLLMGCVAETGTRFPNITNLCPFGEVFNATRFASVYAWNRKRISNCVADYSVLYNSASFSTFKCYGVSPTKLNDLCFTNVYADSFVIRGDEVRQIAPGQTGKIADYNYKLPDDFTGCVIAWNSNNLDSKPGGNYNYLYRLFRKSNLKPFERDISTEIYQAGSTPCNGVEGFNCYFPLQSYGFQPTNGVGYQPYRVVVLSFELLHAPATVCGPKKSTHHHHHHHH

SEQ ID NO: 6081 - protein, 244 aa, Artificial Sequence
  Description of Artificial Sequence: Synthetic polypeptide
MGILPSPGMPALLSLVSLLSVLLMGCVAETGTRFPNITNLCPFGEVFNATRFASVYAWNRKRISNCVADYSGLYNSASFSTFKCYGVSPTKLNDLCFTNVYADSFVIRGDEVRQIAPGQTGKIADYNYKLPDDFTGCVIAWNSNNLDSKVGGNYNYLYRLFRKSNLKPFERDISTEIYQAGSTPCNGVEGFNCYFPLQSYGFQPTNGVGYQPYRVVVLSFELLHAPATVCGPKKSTHHHHHHHH

SEQ ID NO: 6082 - protein, 244 aa, Artificial Sequence
  Description of Artificial Sequence: Synthetic polypeptide
MGILPSPGMPALLSLVSLLSVLLMGCVAETGTRFPNITNLCPFGEVFNATRFASVYAWNRKRISNCVADYSVLYNSASFSTFKCYGVSPTKLNDLCFTNVYADSFVIRGDEVRQIAPGQTGKIADYNYKLPDDFTGCVIAWNSNNLDSKVGGNYNYLYRLFRKSNLKPFERFISTEIYQAGSTPCNGVEGFNCYFPLQSYGFQPTNGVGYQPYRVVVLSFELLHAPATVCGPKKSTHHHHHHHH

SEQ ID NO: 6083 - protein, 244 aa, Artificial Sequence
  Description of Artificial Sequence: Synthetic polypeptide
MGILPSPGMPALLSLVSLLSVLLMGCVAETGTRFPNITNLCPFGEVFNATRFASVYAWNRKRISNCVADYSVLYNSASFSTFKCYGVSPTKLNDLCFTNVYADSFVIRGDEVRQIAPGQTGKIADYNYKLPDDFTGCVIAWNSNNLDSKVGGNYNYLYRLFRKSNLKPFERDISTEAYQAGSTPCNGVEGFNCYFPLQSYGFQPTNGVGYQPYRVVVLSFELLHAPATVCGPKKSTHHHHHHHH

SEQ ID NO: 6084 - protein, 244 aa, Artificial Sequence
  Description of Artificial Sequence: Synthetic polypeptide
MGILPSPGMPALLSLVSLLSVLLMGCVAETGTRFPNITNLCPFGEVFNATRFASVYAWNRKRISNCVADYSVLYNSASFSTFKCYGVSPTKLNDLCFTNVYADSFVIRGDEVRQIAPGQTGKIADYVYKLPDDFTGCVIAWNSNNLDSKVGGNYNYLYRLFRKSNLKPFERDISTEIYQAGSTPCNGVEGFNCYFPLQSYGFQPTNGVGYQPYRVVVLSFELLHAPATVCGPKKSTHHHHHHHH

SEQ ID NO: 6085 - protein, 244 aa, Artificial Sequence
  Description of Artificial Sequence: Synthetic polypeptide
MGILPSPGMPALLSLVSLLSVLLMGCVAETGTRFPVITNLCPFGEVFNATRFASVYAWNRKRISNCVADYSVLYNSASFSTFKCYGVSPTKLNDLCFTNVYADSFVIRGDEVRQIAPGQTGKIADYNYKLPDDFTGCVIAWNSNNLDSKVGGNYNYLYRLFRKSNLKPFERDISTEIYQAGSTPCNGVEGFNCYFPLQSYGFQPTNGVGYQPYRVVVLSFELLHAPATVCGPKKSTHHHHHHHH

SEQ ID NO: 6086 - protein, 244 aa, Artificial Sequence
  Description of Artificial Sequence: Synthetic polypeptide
MGILPSPGMPALLSLVSLLSVLLMGCVAETGTRFPNITNLCPFGEVFNATRFASVYAWNRKRISNCVADYSVLYNSASFSTFKCYGVSPTKLNDLCFTNVYADSFVIRGDEVRQIAPGQTGKIADYNYKLPDDFTGCVIAWNSNNLDSKEGGNYNYLYRLFRKSNLKPFERDISTEIYQAGSTPCNGVEGFNCYFPLQSYGFQPTNGVGYQPYRVVVLSFELLHAPATVCGPKKSTHHHHHHHH

SEQ ID NO: 6087 - protein, 244 aa, Artificial Sequence
  Description of Artificial Sequence: Synthetic polypeptide
MGILPSPGMPALLSLVSLLSVLLMGCVAETGTRFPNITNLCPFGEVFNATRFASVYAWNRKRISNCVADYSVLYNSASFSTFKCYGVSPTKLNDLCFTNIYADSFVIRGDEVRQIAPGQTGKIADYNYKLPDDFTGCVIAWNSNNLDSKVGGNYNYLYRLFRKSNLKPFERDISTEIYQAGSTPCNGVEGFNCYFPLQSYGFQPTNGVGYQPYRVVVLSFELLHAPATVCGPKKSTHHHHHHHH

SEQ ID NO: 6088 - protein, 244 aa, Artificial Sequence
  Description of Artificial Sequence: Synthetic polypeptide
MGILPSPGMPALLSLVSLLSVLLMGCVAETGTRFPNITNLCPFGEVFNATRFASVYAWNRKRISNCVADYSVLYNSASFSTFKCYGVSPTKLNDLCFTNVYADSFVIRGDEVRQIAPGQTGKIADYNYKLPDDFTGCVIAWNSNNLDSKVGGNYNYLYRLFRKSNLKPFERDISTEKYQAGSTPCNGVEGFNCYFPLQSYGFQPTNGVGYQPYRVVVLSFELLHAPATVCGPKKSTHHHHHHHH

SEQ ID NO: 6089 - protein, 244 aa, Artificial Sequence
  Description of Artificial Sequence: Synthetic polypeptide
MGILPSPGMPALLSLVSLLSVLLMGCVAETGTRFPNITNLCPFGEVFNATRFASVYAWNRKRISNCVADYSVLYNSASFSTFKCYGVSPTKLNDLCFTNVYADSFVIRGDEVRQIAPGQTGKIADYNYKLPDDFTGCVIAWNSNNLDSKVGGNYNYLYRLFRKSNLKPFERDISVEIYQAGSTPCNGVEGFNCYFPLQSYGFQPTNGVGYQPYRVVVLSFELLHAPATVCGPKKSTHHHHHHHH

SEQ ID NO: 6090 - protein, 244 aa, Artificial Sequence
  Description of Artificial Sequence: Synthetic polypeptide
MGILPSPGMPALLSLVSLLSVLLMGCVAETGTRFPNITNLCPFGEVFNATRFASVYAWNRKRISNCVADYSVLYNSASFSTFKCYGVSPTKLNDLCFTNVYADTFVIRGDEVRQIAPGQTGKIADYNYKLPDDFTGCVIAWNSNNLDSKVGGNYNYLYRLFRKSNLKPFERDISTEIYQAGSTPCNGVEGFNCYFPLQSYGFQPTNGVGYQPYRVVVLSFELLHAPATVCGPKKSTHHHHHHHH

SEQ ID NO: 6091 - protein, 244 aa, Artificial Sequence
  Description of Artificial Sequence: Synthetic polypeptide
MGILPSPGMPALLSLVSLLSVLLMGCVAETGTRFPNITNLCPFGEVFNATRFASVYAWNRKRISNCVADWSVLYNSASFSTFKCYGVSPTKLNDLCFTNVYADSFVIRGDEVRQIAPGQTGKIADYNYKLPDDFTGCVIAWNSNNLDSKVGGNYNYLYRLFRKSNLKPFERDISTEIYQAGSTPCNGVEGFNCYFPLQSYGFQPTNGVGYQPYRVVVLSFELLHAPATVCGPKKSTHHHHHHHH

SEQ ID NO: 6092 - protein, 244 aa, Artificial Sequence
  Description of Artificial Sequence: Synthetic polypeptide
MGILPSPGMPALLSLVSLLSVLLMGCVAETGTRFPNITNLCPFGEVFNATRFASVYAWNRKRLSNCVADYSVLYNSASFSTFKCYGVSPTKLNDLCFTNVYADSFVIRGDEVRQIAPGQTGKIADYNYKLPDDFTGCVIAWNSNNLDSKVGGNYNYLYRLFRKSNLKPFERDISTEIYQAGSTPCNGVEGFNCYFPLQSYGFQPTNGVGYQPYRVVVLSFELLHAPATVCGPKKSTHHHHHHHH

SEQ ID NO: 6093 - protein, 244 aa, Artificial Sequence
  Description of Artificial Sequence: Synthetic polypeptide
MGILPSPGMPALLSLVSLLSVLLMGCVAETGTRFPNITNLCPFGEVFNATRFASVYAWNRKRISNCVADYSVLYSSASFSTFKCYGVSPTKLNDLCFTNVYADSFVIRGDEVRQIAPGQTGKIADYNYKLPDDFTGCVIAWNSNNLDSKVGGNYNYLYRLFRKSNLKPFERDISTEIYQAGSTPCNGVEGFNCYFPLQSYGFQPTNGVGYQPYRVVVLSFELLHAPATVCGPKKSTHHHHHHHH

SEQ ID NO: 6094 - protein, 244 aa, Artificial Sequence
  Description of Artificial Sequence: Synthetic polypeptide
MGILPSPGMPALLSLVSLLSVLLMGCVAETGTRFPNITNLCPFGEVFNATRFASVYAWNRKRISNCVADYSVLYNSASFSTFKCYGVSPTKLNDLCFTNVYADSFVIRGDEVRQIAPGQTGKIADYNYKLPDDFTGCVIAWNSNNLDSKVGGNYNYLYRLFRKSNLKPFERDISTEVYQAGSTPCNGVEGFNCYFPLQSYGFQPTNGVGYQPYRVVVLSFELLHAPATVCGPKKSTHHHHHHHH

SEQ ID NO: 6095 - protein, 244 aa, Artificial Sequence
  Description of Artificial Sequence: Synthetic polypeptide
MGILPSPGMPALLSLVSLLSVLLMGCVAETGTRFPNITNLCPLGEVFNATRFASVYAWNRKRISNCVADYSVLYNSASFSTFKCYGVSPTKLNDLCFTNVYADSFVIRGDEVRQIAPGQTGKIADYNYKLPDDFTGCVIAWNSNNLDSKVGGNYNYLYRLFRKSNLKPFERDISTEIYQAGSTPCNGVEGFNCYFPLQSYGFQPTNGVGYQPYRVVVLSFELLHAPATVCGPKKSTHHHHHHHH

SEQ ID NO: 6096 - protein, 244 aa, Artificial Sequence
  Description of Artificial Sequence: Synthetic polypeptide
MGILPSPGMPALLSLVSLLSVLLMGCVAETGTRFPNITNLCPFGEVFNATRFASVYAWNRKRISNCVADYSVLYNSASFSTFKCYGVSPTKLNDLCFTNVYADSFVIRGDEVRQIAPGQTGKIADYNYKLPDDFTGCVIAWNSNNLDSKVGGNYNYLYRLFRKSNLKPFERDISTETYQAGSTPCNGVEGFNCYFPLQSYGFQPTNGVGYQPYRVVVLSFELLHAPATVCGPKKSTHHHHHHHH

SEQ ID NO: 6097 - protein, 244 aa, Artificial Sequence
  Description of Artificial Sequence: Synthetic polypeptide
MGILPSPGMPALLSLVSLLSVLLMGCVAETGTRFPNITNLCPFGEVFNATRFASVYAWNRKRISNCVADYSVLYNSASFSTFKCYGVSPTKLNDLCFTNVYADSFVIRGDEVRQIAPGQTGKIADYNYKLPDDFTGCVIAWNSNNLDSKVGGNYNYLYRLFRKSNLKPFERDISTEIYQAGSTPCNGVEGFNAYFPLQSYGFQPTNGVGYQPYRVVVLSFELLHAPATVCGPKKSTHHHHHHHH

SEQ ID NO: 6098 - protein, 244 aa, Artificial Sequence
  Description of Artificial Sequence: Synthetic polypeptide
MGILPSPGMPALLSLVSLLSVLLMGCVAETGTRFPNITNLCPFGEVFNATRFASVYAWNRKRISNCVADYSVLYNSASFSTFKCYGVSPTKLNDLCFTNVYADSFVIRGDQVRQIAPGQTGKIADYNYKLPDDFTGCVIAWNSNNLDSKVGGNYNYLYRLFRKSNLKPFERDISTEIYQAGSTPCNGVEGFNCYFPLQSYGFQPTNGVGYQPYRVVVLSFELLHAPATVCGPKKSTHHHHHHHH

SEQ ID NO: 6099 - protein, 244 aa, Artificial Sequence
  Description of Artificial Sequence: Synthetic polypeptide
MGILPSPGMPALLSLVSLLSVLLMGCVAETGTRFPNITNLCPFGEVFNATRFASVYAWNRKRISNCVADYSVLYNSASFSTFKCYGVSPTKLNDLCFTNVYADSFVIRGDEVRQIAPGQTGKIADYNYKLPDDFTGCVIAWNSNNLDSKVGGNYNYLYRLFRKSNLKPFERDISTEIYQAGSTPCNGVEGFNRYFPLQSYGFQPTNGVGYQPYRVVVLSFELLHAPATVCGPKKSTHHHHHHHH

SEQ ID NO: 6100 - protein, 244 aa, Artificial Sequence
  Description of Artificial Sequence: Synthetic polypeptide
MGILPSPGMPALLSLVSLLSVLLMGCVAETGTRFPNITNLCPFGEVFNATRFASVYAWNRKRISNCVADYSVLYNSASFSTFKCYGVSPTKLNDLCFTNVYADSFVIRGDEVRQIAPGQTGKIADYNYKLPDDFTGCVIAWNSNNLDSKVGGNYNYLYRLFRKSNLKPFERDISTEIYQAGSTPCNGVEGFNYYFPLQSYGFQPTNGVGYQPYRVVVLSFELLHAPATVCGPKKSTHHHHHHHH

SEQ ID NO: 6101 - protein, 244 aa, Artificial Sequence
  Description of Artificial Sequence: Synthetic polypeptide
MGILPSPGMPALLSLVSLLSVLLMGCVAETGTRFPNITNLCPFGEVFNATRFASVYAWNRKRISNCVADYSVLYNSASFSTFKCYGVSPTKLNDLCFTNVYADSFVIRGDEVRQIAPGQTGKIADYNYKLPDDFTGCVIAWNSNNLDSKVGGNYNYLYRLFRKSNLKPFERDISGEIYQAGSTPCNGVEGFNCYFPLQSYGFQPTNGVGYQPYRVVVLSFELLHAPATVCGPKKSTHHHHHHHH

SEQ ID NO: 6102 - protein, 244 aa, Artificial Sequence
  Description of Artificial Sequence: Synthetic polypeptide
MGILPSPGMPALLSLVSLLSVLLMGCVAETGTRFPNITNLCPFGEVFNATRFASVYAWNRKRISNCVADYSVLYNSASFSTFKCYGVSPTKLNDLCFTNVYADSFVIRGDEVRQIAPGQTGKIADYNYKLPDDFTGCVIAWNSNDLDSKVGGNYNYLYRLFRKSNLKPFERDISTEIYQAGSTPCNGVEGFNCYFPLQSYGFQPTNGVGYQPYRVVVLSFELLHAPATVCGPKKSTHHHHHHHH

SEQ ID NO: 6103 - protein, 244 aa, Artificial Sequence
  Description of Artificial Sequence: Synthetic polypeptide
MGILPSPGMPALLSLVSLLSVLLMGCVAETGTRFPNITNLCPFGEVFNATRFAPVYAWNRKRISNCVADYSVLYNSASFSTFKCYGVSPTKLNDLCFTNVYADSFVIRGDEVRQIAPGQTGKIADYNYKLPDDFTGCVIAWNSNNLDSKVGGNYNYLYRLFRKSNLKPFERDISTEIYQAGSTPCNGVEGFNCYFPLQSYGFQPTNGVGYQPYRVVVLSFELLHAPATVCGPKKSTHHHHHHHH

SEQ ID NO: 6104 - protein, 244 aa, Artificial Sequence
  Description of Artificial Sequence: Synthetic polypeptide
MGILPSPGMPALLSLVSLLSVLLMGCVAETGTRFPNITNLCPFGEVFNATRFASVYAWNRKRISNCVADYSVLYNSASFSTFKCYGVSPTKLNDLCFTNVYADSFVIRGDEVRQIAPGQTGKIRDYNYKLPDDFTGCVIAWNSNNLDSKVGGNYNYLYRLFRKSNLKPFERDISTEIYQAGSTPCNGVEGFNCYFPLQSYGFQPTNGVGYQPYRVVVLSFELLHAPATVCGPKKSTHHHHHHHH

SEQ ID NO: 6105 - protein, 244 aa, Artificial Sequence
  Description of Artificial Sequence: Synthetic polypeptide
MGILPSPGMPALLSLVSLLSVLLMGCVAETGTRFPNITNLCPFGEVFNATRFASVYAWNRKRISNCVADYSVLYNSASFSTFKCYGVSPTKLNDLCFVNVYADSFVIRGDEVRQIAPGQTGKIADYNYKLPDDFTGCVIAWNSNNLDSKVGGNYNYLYRLFRKSNLKPFERDISTEIYQAGSTPCNGVEGFNCYFPLQSYGFQPTNGVGYQPYRVVVLSFELLHAPATVCGPKKSTHHHHHHHH

SEQ ID NO: 6106 - protein, 244 aa, Artificial Sequence
  Description of Artificial Sequence: Synthetic polypeptide
MGILPSPGMPALLSLVSLLSVLLMGCVAETGTRFPNITNLCPFGEVFNATRFASVYAWNRKRISNCVADYSVLYNSASFSTFKCYGVSPTKLNDLCFTNVYADSFVIRGDEVRQIAPGQTGKIADYNYKLPDDFTGCVIAWNSNNLDSKVGGNYNYLYRLFRKSNLKPFERDISTLIYQAGSTPCNGVEGFNCYFPLQSYGFQPTNGVGYQPYRVVVLSFELLHAPATVCGPKKSTHHHHHHHH

SEQ ID NO: 6107 - protein, 244 aa, Artificial Sequence
  Description of Artificial Sequence: Synthetic polypeptide
MGILPSPGMPALLSLVSLLSVLLMGCVAETGTRFPNITNLCPFGEVFNATRFASVYAWNRKRISNCVADYSVLYNSASFSTFKCYGVSPTKLNDLCFTNVYADSFVIRGDEVRQIAPGQTGKIADYNYKLPDDFTGCVIAWNSNNLDSKVGGNYNYLYRLFRKSNLKPFERDISCEIYQAGSTPCNGVEGFNCYFPLQSYGFQPTNGVGYQPYRVVVLSFELLHAPATVCGPKKSTHHHHHHHH

SEQ ID NO: 6108 - protein, 244 aa, Artificial Sequence
  Description of Artificial Sequence: Synthetic polypeptide
MGILPSPGMPALLSLVSLLSVLLMGCVAETGTRFPNITNLCPFGEVFNATRFASVYAWNRKRISNCVADYSVLYNSASFSTFKCYGVSPTKLNDLCFTNVYADSFVIRGDEVRQIAPGQTGKIADYNYKLPDDFTGCVIAWNSKNLDSKVGGNYNYLYRLFRKSNLKPFERDISTEIYQAGSTPCNGVEGFNCYFPLQSYGFQPTNGVGYQPYRVVVLSFELLHAPATVCGPKKSTHHHHHHHH

SEQ ID NO: 6109 - protein, 244 aa, Artificial Sequence
  Description of Artificial Sequence: Synthetic polypeptide
MGILPSPGMPALLSLVSLLSVLLMGCVAETGTRFPNITNLCPFGEVFNATRFASVYAWNRKRYSNCVADYSVLYNSASFSTFKCYGVSPTKLNDLCFTNVYADSFVIRGDEVRQIAPGQTGKIADYNYKLPDDFTGCVIAWNSNNLDSKVGGNYNYLYRLFRKSNLKPFERDISTEIYQAGSTPCNGVEGFNCYFPLQSYGFQPTNGVGYQPYRVVVLSFELLHAPATVCGPKKSTHHHHHHHH

SEQ ID NO: 6110 - protein, 244 aa, Artificial Sequence
  Description of Artificial Sequence: Synthetic polypeptide
MGILPSPGMPALLSLVSLLSVLLMGCVAETGTRFPNITNLCPFGEVFNATRFASVYAWNRKRISNCVADYSVLYNSASFSTFKCYGVSPTKLNDLCFTNVYADSFVIRGDEVRQIAPGQTGKIADYNYKLPDDFTGCVIAWNSNNLDSKVGGNYNYLYRLFRKSNLKPFERDITTEIYQAGSTPCNGVEGFNCYFPLQSYGFQPTNGVGYQPYRVVVLSFELLHAPATVCGPKKSTHHHHHHHH

SEQ ID NO: 6111 - protein, 244 aa, Artificial Sequence
  Description of Artificial Sequence: Synthetic polypeptide
MGILPSPGMPALLSLVSLLSVLLMGCVAETGTRFPNITNLCPFGEVFNATRFASVYAWNRKRISNCVADYSVLYNSASFSTFKCYGVSPTKLNDLCFTNVYADSFVIRGDEVRQIAPGQTGKIADYNYKLPDDFTGCVIAWNSNNLDSKVGGNYNYLYRLFRKSNLKPFERDISTEIYQAGSTPCNGVEGFNCYFPLQSYGFQPTNGVGYQPYRVVVLSFELLGAPATVCGPKKSTHHHHHHHH

SEQ ID NO: 6112 - protein, 244 aa, Artificial Sequence
  Description of Artificial Sequence: Synthetic polypeptide
MGILPSPGMPALLSLVSLLSVLLMGCVAETGTRFPNITNLCPFGEVFNATRFASVYSWNRKRISNCVADYSVLYNSASFSTFKCYGVSPTKLNDLCFTNVYADSFVIRGDEVRQIAPGQTGKIADYNYKLPDDFTGCVIAWNSNNLDSKVGGNYNYLYRLFRKSNLKPFERDISTEIYQAGSTPCNGVEGFNCYFPLQSYGFQPTNGVGYQPYRVVVLSFELLHAPATVCGPKKSTHHHHHHHH

SEQ ID NO: 6113 - protein, 244 aa, Artificial Sequence
  Description of Artificial Sequence: Synthetic polypeptide
MGILPSPGMPALLSLVSLLSVLLMGCVAETGTRFPNITNLCPFGEVFNATRFASVYAWNRKRISNCVADYSVLYNSASFSTFKCYGVSPTKLNDLCFTNVYADVFVIRGDEVRQIAPGQTGKIADYNYKLPDDFTGCVIAWNSNNLDSKVGGNYNYLYRLFRKSNLKPFERDISTEIYQAGSTPCNGVEGFNCYFPLQSYGFQPTNGVGYQPYRVVVLSFELLHAPATVCGPKKSTHHHHHHHH

SEQ ID NO: 6114 - protein, 244 aa, Artificial Sequence
  Description of Artificial Sequence: Synthetic polypeptide
MGILPSPGMPALLSLVSLLSVLLMGCVAETGTRFTNITNLCPFGEVFNATRFASVYAWNRKRISNCVADYSVLYNSASFSTFKCYGVSPTKLNDLCFTNVYADSFVIRGDEVRQIAPGQTGKIADYNYKLPDDFTGCVIAWNSNNLDSKVGGNYNYLYRLFRKSNLKPFERDISTEIYQAGSTPCNGVEGFNCYFPLQSYGFQPTNGVGYQPYRVVVLSFELLHAPATVCGPKKSTHHHHHHHH

SEQ ID NO: 6115 - protein, 244 aa, Artificial Sequence
  Description of Artificial Sequence: Synthetic polypeptide
MGILPSPGMPALLSLVSLLSVLLMGCVAETGTRFPNITNLCPFGEVFNATRFASVYAWNRKRISNCVADYSVLYNSASFSTFKCYGVSMTKLNDLCFTNVYADSFVIRGDEVRQIAPGQTGKIADYNYKLPDDFTGCVIAWNSNNLDSKVGGNYNYLYRLFRKSNLKPFERDISTEIYQAGSTPCNGVEGFNCYFPLQSYGFQPTNGVGYQPYRVVVLSFELLHAPATVCGPKKSTHHHHHHHH

SEQ ID NO: 6116 - protein, 244 aa, Artificial Sequence
  Description of Artificial Sequence: Synthetic polypeptide
MGILPSPGMPALLSLVSLLSVLLMGCVAETGTRFPNITNLCPFGEVFNATRFASVYAWNRKRISNCVADYSVLYNSASFSTFKCYGVSPTKLNDLCFTNVYADSFVIRGDEVRQIAPGQTGKIADYNYKLPDDFTGCVIAWNSNNLDSKVGGNYNYLYRLFRKSNLKPFERDISTGIYQAGSTPCNGVEGFNCYFPLQSYGFQPTNGVGYQPYRVVVLSFELLHAPATVCGPKKSTHHHHHHHH

SEQ ID NO: 6117 - protein, 244 aa, Artificial Sequence
  Description of Artificial Sequence: Synthetic polypeptide
MGILPSPGMPALLSLVSLLSVLLMGCVAETGTRFPNITNLCPFGEVFNATRFASVYAWNRKRISNCVADYSILYNSASFSTFKCYGVSPTKLNDLCFTNVYADSFVIRGDEVRQIAPGQTGKIADYNYKLPDDFTGCVIAWNSNNLDSKVGGNYNYLYRLFRKSNLKPFERDISTEIYQAGSTPCNGVEGFNCYFPLQSYGFQPTNGVGYQPYRVVVLSFELLHAPATVCGPKKSTHHHHHHHH

SEQ ID NO: 6118 - protein, 244 aa, Artificial Sequence
  Description of Artificial Sequence: Synthetic polypeptide
MGILPSPGMPALLSLVSLLSVLLMGCVAETGTRFPNITNLCPFGEVFNATRFASVYAWNRKRISNCVADYSVLYNSASFSTFKCYGVSPTKLNDLCFTNVYADSFVIRGDEVREIAPGQTGKIADYNYKLPDDFTGCVIAWNSNNLDSKVGGNYNYLYRLFRKSNLKPFERDISTEIYQAGSTPCNGVEGFNCYFPLQSYGFQPTNGVGYQPYRVVVLSFELLHAPATVCGPKKSTHHHHHHHH

SEQ ID NO: 6119 - protein, 244 aa, Artificial Sequence
  Description of Artificial Sequence: Synthetic polypeptide
MGILPSPGMPALLSLVSLLSVLLMGCVAETGTRFPNITNLCPFGEVFNATRFASVYAWNRKRISNCVADYSVLYNSASFSTFKCYGVSPTKLNDLCFTNVYADSFVIRGDEVRQIAPGQTGKIADYNYKLPDDFTGCVIAWNSNNLDSKVGGNYNYLYRLFRKSNLNPFERDISTEIYQAGSTPCNGVEGFNCYFPLQSYGFQPTNGVGYQPYRVVVLSFELLHAPATVCGPKKSTHHHHHHHH

SEQ ID NO: 6120 - protein, 244 aa, Artificial Sequence
  Description of Artificial Sequence: Synthetic polypeptide
MGILPSPGMPALLSLVSLLSVLLMGCVAETGTRFPNITNLCPFGEVFNATRFASVYDWNRKRISNCVADYSVLYNSASFSTFKCYGVSPTKLNDLCFTNVYADSFVIRGDEVRQIAPGQTGKIADYNYKLPDDFTGCVIAWNSNNLDSKVGGNYNYLYRLFRKSNLKPFERDISTEIYQAGSTPCNGVEGFNCYFPLQSYGFQPTNGVGYQPYRVVVLSFELLHAPATVCGPKKSTHHHHHHHH

SEQ ID NO: 6121 - protein, 244 aa, Artificial Sequence
  Description of Artificial Sequence: Synthetic polypeptide
MGILPSPGMPALLSLVSLLSVLLMGCVAETGTRFPNITNLCPFGEVFNATRFASVYAWNRKRISNCVADYSVLYNSASFSTFKCYGVSPTKLNDLCFTNVYADSFVIRGDEVRQIAPGQTGKIADYNYKLPDDFTGCVIAWNSNNLDSKVGGNYNYLYRLFRKSNLKPFERDISTEGYQAGSTPCNGVEGFNCYFPLQSYGFQPTNGVGYQPYRVVVLSFELLHAPATVCGPKKSTHHHHHHHH

SEQ ID NO: 6122 - protein, 244 aa, Artificial Sequence
  Description of Artificial Sequence: Synthetic polypeptide
MGILPSPGMPALLSLVSLLSVLLMGCVAETGTRFPNITNLCPFGEVFNATRFASVYAWNRKRISNCVADYSVLYNSASFSTFKCYGVSPTKLNDLCFTNVYADSFVIRGDEVRQIAPGQTGKIADYNYKLPDDFTGCVIAWNSNNLDSKVGGNYNYLYRLFRKSNLKPFERDISTEIYQAGSTPCNGVEGFNCYFPLQSYGFQPTNGVNYQPYRVVVLSFELLHAPATVCGPKKSTHHHHHHHH

SEQ ID NO: 6123 - protein, 244 aa, Artificial Sequence
  Description of Artificial Sequence: Synthetic polypeptide
MGILPSPGMPALLSLVSLLSVLLMGCVAETGTRFPNITNLCPFGEVFNATRFASVYAWNRKRISNCVADYSVLYNSASFSTFKCYGVSPTKLNDLCFTNVYADSFVIRGDEVRQIAPGQTGKIADYNYKLPDDFTGCVIAWNSNNLDSKVGGNYNYLYRLFRKSNLKPFEFDISTEIYQAGSTPCNGVEGFNCYFPLQSYGFQPTNGVGYQPYRVVVLSFELLHAPATVCGPKKSTHHHHHHHH

SEQ ID NO: 6124 - protein, 244 aa, Artificial Sequence
  Description of Artificial Sequence: Synthetic polypeptide
MGILPSPGMPALLSLVSLLSVLLMGCVAETGTRFPNITNLCPFGEVFNATRFASVYAWNRKRISNCVADYSVLYNSASFSTFKCYGVSPTKLNDLCFTNVYADQFVIRGDEVRQIAPGQTGKIADYNYKLPDDFTGCVIAWNSNNLDSKVGGNYNYLYRLFRKSNLKPFERDISTEIYQAGSTPCNGVEGFNCYFPLQSYGFQPTNGVGYQPYRVVVLSFELLHAPATVCGPKKSTHHHHHHHH

SEQ ID NO: 6125 - protein, 244 aa, Artificial Sequence
  Description of Artificial Sequence: Synthetic polypeptide
MGILPSPGMPALLSLVSLLSVLLMGCVAETGTRFPNITNLCPFGEVFNATRFASVYAWNRKRISNCVADYSVLYNSATFSTFKCYGVSPTKLNDLCFTNVYADSFVIRGDEVRQIAPGQTGKIADYNYKLPDDFTGCVIAWNSNNLDSKVGGNYNYLYRLFRKSNLKPFERDISTEIYQAGSTPCNGVEGFNCYFPLQSYGFQPTNGVGYQPYRVVVLSFELLHAPATVCGPKKSTHHHHHHHH

SEQ ID NO: 6126 - protein, 244 aa, Artificial Sequence
  Description of Artificial Sequence: Synthetic polypeptide
MGILPSPGMPALLSLVSLLSVLLMGCVAETGTRFPNITNLCPFGEVFNATRFASVYAWNRKRISNCVADYSVLYNSASFSTFKCYGVSPTKLNDLCFTNVYADSFVIRGDEVRQIAPGQTGKIADYNYKLPDDFTGCVIAWNSENLDSKVGGNYNYLYRLFRKSNLKPFERDISTEIYQAGSTPCNGVEGFNCYFPLQSYGFQPTNGVGYQPYRVVVLSFELLHAPATVCGPKKSTHHHHHHHH

SEQ ID NO: 6127 - protein, 244 aa, Artificial Sequence
  Description of Artificial Sequence: Synthetic polypeptide
MGILPSPGMPALLSLVSLLSVLLMGCVAETGTRFPNITNLCPFGEVFNATRFASVYAWNRKRISNCVADYSVLYNSASFSTFKCYGVSPTKLNDLCFTNVYADSFVIRGDEVRQIAPGQTGKIADYNYKLPDDFTGCVIAWNSNNLDSKMGGNYNYLYRLFRKSNLKPFERDISTEIYQAGSTPCNGVEGFNCYFPLQSYGFQPTNGVGYQPYRVVVLSFELLHAPATVCGPKKSTHHHHHHHH

SEQ ID NO: 6128 - protein, 244 aa, Artificial Sequence
  Description of Artificial Sequence: Synthetic polypeptide
MGILPSPGMPALLSLVSLLSVLLMGCVAETGTRFPNITNLCPFGEVFNATRFASVYAWNRKRISNCVADYSTLYNSASFSTFKCYGVSPTKLNDLCFTNVYADSFVIRGDEVRQIAPGQTGKIADYNYKLPDDFTGCVIAWNSNNLDSKVGGNYNYLYRLFRKSNLKPFERDISTEIYQAGSTPCNGVEGFNCYFPLQSYGFQPTNGVGYQPYRVVVLSFELLHAPATVCGPKKSTHHHHHHHH

SEQ ID NO: 6129 - protein, 244 aa, Artificial Sequence
  Description of Artificial Sequence: Synthetic polypeptide
MGILPSPGMPALLSLVSLLSVLLMGCVAETGTRFPNITNLCPFGEVFNATRFASVYAWNRKRISNCVADYSVLYNSASFSTFKCYGVSPTKLNDLCFTNVYADSFVIRGDEVRQIAPGQTGKIADYNYQLPDDFTGCVIAWNSNNLDSKVGGNYNYLYRLFRKSNLKPFERDISTEIYQAGSTPCNGVEGFNCYFPLQSYGFQPTNGVGYQPYRVVVLSFELLHAPATVCGPKKSTHHHHHHHH

SEQ ID NO: 6130 - protein, 244 aa, Artificial Sequence
  Description of Artificial Sequence: Synthetic polypeptide
MGILPSPGMPALLSLVSLLSVLLMGCVAETGTRFPNITNLCPFGEVFNATRFASVYAWNRKRISNCVADYSVLYNSASFSTFKCYGVSPTKLNDLCFTNVYADSFVIRGDEVRQIAPGQTGKIADYNYKLPDDFTGCVIAWNSNNLDSKVGGNYNYLYRLFRKSNLKPFERDIDTEIYQAGSTPCNGVEGFNCYFPLQSYGFQPTNGVGYQPYRVVVLSFELLHAPATVCGPKKSTHHHHHHHH

SEQ ID NO: 6131 - protein, 244 aa, Artificial Sequence
  Description of Artificial Sequence: Synthetic polypeptide
MGILPSPGMPALLSLVSLLSVLLMGCVAETGTRFPNITNLCPFGEVFNATRFASVYAWNRKRISNCVADYSVLYNSASFSTFKCYGVSPTKLNDLCFTNVYADSFVIRGDEVRQIAPGQTGKIADYNYKLPDDFTGCVIAWNSNNLDCKVGGNYNYLYRLFRKSNLKPFERDISTEIYQAGSTPCNGVEGFNCYFPLQSYGFQPTNGVGYQPYRVVVLSFELLHAPATVCGPKKSTHHHHHHHH

SEQ ID NO: 6132 - protein, 244 aa, Artificial Sequence
  Description of Artificial Sequence: Synthetic polypeptide
MGILPSPGMPALLSLVSLLSVLLMGCVAETGTRFPNITNLCPFGEVFNATRFASVYAWNRKRISNCVADYSVLYNSASFSTFKCYGVSPTKLNDLCFTNVYADSFVIRGDEVRQIAPGQTGKIADYNYKLPDDFTGCVIAWNSNNLDSKVGGNYNYLYRLFRKSNLKPFERDISTVIYQAGSTPCNGVEGFNCYFPLQSYGFQPTNGVGYQPYRVVVLSFELLHAPATVCGPKKSTHHHHHHHH

SEQ ID NO: 6133 - protein, 244 aa, Artificial Sequence
  Description of Artificial Sequence: Synthetic polypeptide
MGILPSPGMPALLSLVSLLSVLLMGCVAETGTRFPNITNLCPFGEVFNATRFASVYAWNRKRISNCVADYSVLYNSASFSTFKCYGVSPTKLNDLCFTNVYADSFVIRGDEVRQIAPGQTGKIADYNYKLPDDFTGCVIAWNSNNLDSKVGGNYNYLYRLFRKSNFKPFERDISTEIYQAGSTPCNGVEGFNCYFPLQSYGFQPTNGVGYQPYRVVVLSFELLHAPATVCGPKKSTHHHHHHHH

SEQ ID NO: 6134 - protein, 244 aa, Artificial Sequence
  Description of Artificial Sequence: Synthetic polypeptide
MGILPSPGMPALLSLVSLLSVLLMGCVAETGTRFPNITNLCPFGEVFNATRFASVYAWNRKRISNCVADYSVLYNSASFSTFKCYGVSPTKLNDLCFTNVYADSFVIRGDEVRQIAPGQTGKIADYNYKLPDDFTGCVIAWNSNNLDSKVGGNYNYLYRLFRKSNLKPFERDISTEIYQAGSTPCNGVEGFNWYFPLQSYGFQPTNGVGYQPYRVVVLSFELLHAPATVCGPKKSTHHHHHHHH

SEQ ID NO: 6135 - protein, 244 aa, Artificial Sequence
  Description of Artificial Sequence: Synthetic polypeptide
MGILPSPGMPALLSLVSLLSVLLMGCVAETGTRFPNITNLCPFGEVFNATRFASVYAWNRKRISNCVADYSVLYNSASFSTFKCYGVSPTKLNDLCFTNVYADSFVIRGDEVRQIAPGQTGKIADYNYKLPDDFTGCVIAWNSNNLDSKVGGNYNYLYRLHRKSNLKPFERDISTEIYQAGSTPCNGVEGFNCYFPLQSYGFQPTNGVGYQPYRVVVLSFELLHAPATVCGPKKSTHHHHHHHH

SEQ ID NO: 6136 - protein, 244 aa, Artificial Sequence
  Description of Artificial Sequence: Synthetic polypeptide
MGILPSPGMPALLSLVSLLSVLLMGCVAETGTRFPNITNLCPFGEVFNATRFASVYAWNRKRISNCVADYSVLYNSASFSTFKCYGVSPTKLNDLCFTNVYADSFVIRGDEVRQIAPGQTGKIADYNYKLPDDFTGCVIAWNSNNLDSKVGGNYNYLYRLFRKSNLKPFERDISTEIYQAGSTPCNGVEGFNCYFPLQSYGFQPTNGVMYQPYRVVVLSFELLHAPATVCGPKKSTHHHHHHHH

SEQ ID NO: 6137 - protein, 244 aa, Artificial Sequence
  Description of Artificial Sequence: Synthetic polypeptide
MGILPSPGMPALLSLVSLLSVLLMGCVAETGTRFPNITNLCPFGEVFNATRFASVYAWNRKRISNCVADYSVLYNSASFSTFKCYGVSPTKLNDLCFTNVYADNFVIRGDEVRQIAPGQTGKIADYNYKLPDDFTGCVIAWNSNNLDSKVGGNYNYLYRLFRKSNLKPFERDISTEIYQAGSTPCNGVEGFNCYFPLQSYGFQPTNGVGYQPYRVVVLSFELLHAPATVCGPKKSTHHHHHHHH

SEQ ID NO: 6138 - protein, 244 aa, Artificial Sequence
  Description of Artificial Sequence: Synthetic polypeptide
MGILPSPGMPALLSLVSLLSVLLMGCVAETGTRFPNITNLCPFGEVFNATRFASVYAWNRKRISNCVADYSVLYNSASFSTFKCYGVSPTKLNDLCFTNVYADSFVIRGDEVRQIAPGQTGKIADYNYKLPDDFTGCVIAWNSNNLDSKVGGNYNYLYRLFRKSNLKPYERDISTEIYQAGSTPCNGVEGFNCYFPLQSYGFQPTNGVGYQPYRVVVLSFELLHAPATVCGPKKSTHHHHHHHH

SEQ ID NO: 6139 - protein, 244 aa, Artificial Sequence
  Description of Artificial Sequence: Synthetic polypeptide
MGILPSPGMPALLSLVSLLSVLLMGCVAETGTRFPNITNLCPFGEVFNATRFASVYAWNRKRISNCVADYSVLYNSASFSTFKCYGVSPTKLNDLCFTNVYADSFVIRGDEVRQIAPGQTGKIADYNYKLPDDFTGCVIAWNSNNLDSKVGGNYNYLYRLFRKSNLKPFERDISTEIYQAGSTPCNGVEGFNCYFPLQSYGFQPTNGVGYQPYRVVVLSFELLAAPATVCGPKKSTHHHHHHHH

SEQ ID NO: 6140 - protein, 244 aa, Artificial Sequence
  Description of Artificial Sequence: Synthetic polypeptide
MGILPSPGMPALLSLVSLLSVLLMGCVAETGTRFPNITNLCPFGEVFNATRFASVYAWNRKRISNCVADYSVLYNSASFSTFKCYGVSPTKLNDLCFTNVYADSFVIRGDEVRQIAPGQTGKIADYNYKLPDDFTGCVIAWNSNSLDSKVGGNYNYLYRLFRKSNLKPFERDISTEIYQAGSTPCNGVEGFNCYFPLQSYGFQPTNGVGYQPYRVVVLSFELLHAPATVCGPKKSTHHHHHHHH

SEQ ID NO: 6141 - protein, 244 aa, Artificial Sequence
  Description of Artificial Sequence: Synthetic polypeptide
MGILPSPGMPALLSLVSLLSVLLMGCVAETGTRFPNITNLCPFGEVFNATRFASVYAWNRKRISNCVADYSVLYNSASFSTFKCYGVSPTKLNDLCFTNVYADSFVIRGDEVRQIAPGQTGKIADYNYKLPDDFTGCVIAWNSNNLDSKCGGNYNYLYRLFRKSNLKPFERDISTEIYQAGSTPCNGVEGFNCYFPLQSYGFQPTNGVGYQPYRVVVLSFELLHAPATVCGPKKSTHHHHHHHH

SEQ ID NO: 6142 - protein, 244 aa, Artificial Sequence
  Description of Artificial Sequence: Synthetic polypeptide
MGILPSPGMPALLSLVSLLSVLLMGCVAETGTRFPNITNLCPFGEVFNATRFASVYAWNRKRISNCVADYSVLYNSASFSTFKCYGVSPTKLNDLCFTNVYADSFVIRGDEVRQIAPGQTGKIADYNYKLPDDFTGCVIAWNSNNLDSKVGGNYNYLYRLFRKSNLKPFERDISTEIYQAGSTPCNGVEGFNCYFPLQSYGFQPTNGVGYQPYRVVVLSFELDHAPATVCGPKKSTHHHHHHHH

SEQ ID NO: 6143 - protein, 244 aa, Artificial Sequence
  Description of Artificial Sequence: Synthetic polypeptide
MGILPSPGMPALLSLVSLLSVLLMGCVAETGTRFPNITNLCPFGEVFNATRFASVYAWNRKRISNCVADYSVLYNSASFSTFKCYGVSPTKLNDLCFTNVYADSFVIRGDEVRQIAPGQTGKIADYNYKLPDDFTGCVIAWNSQNLDSKVGGNYNYLYRLFRKSNLKPFERDISTEIYQAGSTPCNGVEGFNCYFPLQSYGFQPTNGVGYQPYRVVVLSFELLHAPATVCGPKKSTHHHHHHHH

SEQ ID NO: 6144 - protein, 244 aa, Artificial Sequence
  Description of Artificial Sequence: Synthetic polypeptide
MGILPSPGMPALLSLVSLLSVLLMGCVAETGTRFPNITNLCPFGEVFNATRFASVYAWNRKRISNCVADYSVLYNSASFSTFKCYGVSPTKLNDLCFTNVYADSFVIRGDEVRQIAPGQTGKIADYNYKLPDDFTGCVIAWNSNNLDSKVGGNYNYLYRLFRKSNLKPFERDISTEIYQAGSTPCNGVEGFNCYFPLQSYGFQPTNGVGYQPYRVVVLSFELLEAPATVCGPKKSTHHHHHHHH

SEQ ID NO: 6145 - protein, 244 aa, Artificial Sequence
  Description of Artificial Sequence: Synthetic polypeptide
MGILPSPGMPALLSLVSLLSVLLMGCVAETGTRFPNITNLCPFGEVFNATRFASVYAWNRKRISNCVADFSVLYNSASFSTFKCYGVSPTKLNDLCFTNVYADSFVIRGDEVRQIAPGQTGKIADYNYKLPDDFTGCVIAWNSNNLDSKVGGNYNYLYRLFRKSNLKPFERDISTEIYQAGSTPCNGVEGFNCYFPLQSYGFQPTNGVGYQPYRVVVLSFELLHAPATVCGPKKSTHHHHHHHH

SEQ ID NO: 6146 - protein, 244 aa, Artificial Sequence
  Description of Artificial Sequence: Synthetic polypeptide
MGILPSPGMPALLSLVSLLSVLLMGCVAETGTRFPNITNLCPFGEVFNATRFASVYAWNRKRFSNCVADYSVLYNSASFSTFKCYGVSPTKLNDLCFTNVYADSFVIRGDEVRQIAPGQTGKIADYNYKLPDDFTGCVIAWNSNNLDSKVGGNYNYLYRLFRKSNLKPFERDISTEIYQAGSTPCNGVEGFNCYFPLQSYGFQPTNGVGYQPYRVVVLSFELLHAPATVCGPKKSTHHHHHHHH

SEQ ID NO: 6147 - protein, 244 aa, Artificial Sequence
  Description of Artificial Sequence: Synthetic polypeptide
MGILPSPGMPALLSLVSLLSVLLMGCVAETGTRFPNITNLCPFGEVFNATRFASVYAWNRKRISNCVADYSVLYNSASFSTFKCYGVSPTKLNDLCFTNVYADSFVIRGDEVRQIAPGQTGKIADYNYKLPDDFTGCVIAWNSNNLDSKVGGNYNYLYRLFRKSNLKPFERDISTEIYQAGSTPCNGVEGFNCYFPLQSYGFQPTNGVGYQPYRVVVLSFELNHAPATVCGPKKSTHHHHHHHH

SEQ ID NO: 6148 - protein, 244 aa, Artificial Sequence
  Description of Artificial Sequence: Synthetic polypeptide
MGILPSPGMPALLSLVSLLSVLLMGCVAETGTRFPNITNLCPFGEVFNATRFGSVYAWNRKRISNCVADYSVLYNSASFSTFKCYGVSPTKLNDLCFTNVYADSFVIRGDEVRQIAPGQTGKIADYNYKLPDDFTGCVIAWNSNNLDSKVGGNYNYLYRLFRKSNLKPFERDISTEIYQAGSTPCNGVEGFNCYFPLQSYGFQPTNGVGYQPYRVVVLSFELLHAPATVCGPKKSTHHHHHHHH

SEQ ID NO: 6149 - protein, 244 aa, Artificial Sequence
  Description of Artificial Sequence: Synthetic polypeptide
MGILPSPGMPALLSLVSLLSVLLMGCVAETGTRFPNITNLCPFGEVFNATRFASVYAWNRKRISNCVADYSQLYNSASFSTFKCYGVSPTKLNDLCFTNVYADSFVIRGDEVRQIAPGQTGKIADYNYKLPDDFTGCVIAWNSNNLDSKVGGNYNYLYRLFRKSNLKPFERDISTEIYQAGSTPCNGVEGFNCYFPLQSYGFQPTNGVGYQPYRVVVLSFELLHAPATVCGPKKSTHHHHHHHH

SEQ ID NO: 6150 - protein, 244 aa, Artificial Sequence
  Description of Artificial Sequence: Synthetic polypeptide
MGILPSPGMPALLSLVSLLSVLLMGCVAETGTRFPNITNLCPFGEVFNATRFASVYAWNRKRISNCVADYSVLYNSASFSTFKCYGVSPTKLNDLCFTNVYADSFVIRGDEVRQIAPGQTGKIADYNYKLPDDFTGCVIAWNSGNLDSKVGGNYNYLYRLFRKSNLKPFERDISTEIYQAGSTPCNGVEGFNCYFPLQSYGFQPTNGVGYQPYRVVVLSFELLHAPATVCGPKKSTHHHHHHHH

SEQ ID NO: 6151 - protein, 244 aa, Artificial Sequence
  Description of Artificial Sequence: Synthetic polypeptide
MGILPSPGMPALLSLVSLLSVLLMGCVAETGTRFPNITNLCPFGEVFNATRFASVYAWNRKRISNCWADYSVLYNSASFSTFKCYGVSPTKLNDLCFTNVYADSFVIRGDEVRQIAPGQTGKIADYNYKLPDDFTGCVIAWNSNNLDSKVGGNYNYLYRLFRKSNLKPFERDISTEIYQAGSTPCNGVEGFNCYFPLQSYGFQPTNGVGYQPYRVVVLSFELLHAPATVCGPKKSTHHHHHHHH

SEQ ID NO: 6152 - protein, 244 aa, Artificial Sequence
  Description of Artificial Sequence: Synthetic polypeptide
MGILPSPGMPALLSLVSLLSVLLMGCVAETGTRFPNITNLCPFGEVFNATRFASVYAWNRKRISNCVADYSVLYNSASFSTFKCYGVSPTKLNDLCFTNVYADSFVIRGDEVRQIAPGQTGKIADYNYKLPDDFTGCVIAWNSNNLDSKVGGNYNYLYRLFRKSNLKPFERDISTDIYQAGSTPCNGVEGFNCYFPLQSYGFQPTNGVGYQPYRVVVLSFELLHAPATVCGPKKSTHHHHHHHH

SEQ ID NO: 6153 - protein, 244 aa, Artificial Sequence
  Description of Artificial Sequence: Synthetic polypeptide
MGILPSPGMPALLSLVSLLSVLLMGCVAETGTRFPNITNLCPFGEVFNATRFASVYAWNRKRISNCVADYSVLYNSASFSTFKCYGVSPTKLNDLCFTNVYADSFVIRGDEVRQIAPGQTGKIADYNYKLPDDFTGCVIAWNSNNLDSKVGGNYNYLYRLFRKSNLKPFERYISTEIYQAGSTPCNGVEGFNCYFPLQSYGFQPTNGVGYQPYRVVVLSFELLHAPATVCGPKKSTHHHHHHHH

SEQ ID NO: 6154 - protein, 244 aa, Artificial Sequence
  Description of Artificial Sequence: Synthetic polypeptide
MGILPSPGMPALLSLVSLLSVLLMGCVAETGTRFPNITNLCPFGEVFNATRFASVYAWNRKRISNCVADYSVLYNSASFSTFKCYGVSPTKLNDLCFTNVYADSFVIRGDEVRQIAPGQTGKIADYTYKLPDDFTGCVIAWNSNNLDSKVGGNYNYLYRLFRKSNLKPFERDISTEIYQAGSTPCNGVEGFNCYFPLQSYGFQPTNGVGYQPYRVVVLSFELLHAPATVCGPKKSTHHHHHHHH

SEQ ID NO: 6155 - protein, 244 aa, Artificial Sequence
  Description of Artificial Sequence: Synthetic polypeptide
MGILPSPGMPALLSLVSLLSVLLMGCVAETGTRFPNITNLCPFGEIFNATRFASVYAWNRKRISNCVADYSVLYNSASFSTFKCYGVSPTKLNDLCFTNVYADSFVIRGDEVRQIAPGQTGKIADYNYKLPDDFTGCVIAWNSNNLDSKVGGNYNYLYRLFRKSNLKPFERDISTEIYQAGSTPCNGVEGFNCYFPLQSYGFQPTNGVGYQPYRVVVLSFELLHAPATVCGPKKSTHHHHHHHH

SEQ ID NO: 6156 - protein, 244 aa, Artificial Sequence
  Description of Artificial Sequence: Synthetic polypeptide
MGILPSPGMPALLSLVSLLSVLLMGCVAETGTRFPNITNLCPFGEVFNATRFASVYAWNRKRISNCVADYSVLYNSASFSTFKCYGVSPTKLNDLCFTNVYADIFVIRGDEVRQIAPGQTGKIADYNYKLPDDFTGCVIAWNSNNLDSKVGGNYNYLYRLFRKSNLKPFERDISTEIYQAGSTPCNGVEGFNCYFPLQSYGFQPTNGVGYQPYRVVVLSFELLHAPATVCGPKKSTHHHHHHHH

SEQ ID NO: 6157 - protein, 244 aa, Artificial Sequence
  Description of Artificial Sequence: Synthetic polypeptide
MGILPSPGMPALLSLVSLLSVLLMGCVAETGTRFPNITNLCPFGEVFNATRFCSVYAWNRKRISNCVADYSVLYNSASFSTFKCYGVSPTKLNDLCFTNVYADSFVIRGDEVRQIAPGQTGKIADYNYKLPDDFTGCVIAWNSNNLDSKVGGNYNYLYRLFRKSNLKPFERDISTEIYQAGSTPCNGVEGFNCYFPLQSYGFQPTNGVGYQPYRVVVLSFELLHAPATVCGPKKSTHHHHHHHH

SEQ ID NO: 6158 - protein, 244 aa, Artificial Sequence
  Description of Artificial Sequence: Synthetic polypeptide
MGILPSPGMPALLSLVSLLSVLLMGCVAETGTRFPNITNLCPFGEVFNATRFASVYAWNRKRISNCVADYSVLYNSASFSTFKCYGVSPTKLNDLCFTNVYADSFVIRGDEVRQIAPGQTGKIADYNYKLPDDFTGCVIAWNSNNLDSKVGGNYNYLYRLFRKSNLKPFERDISTEIYQAGSTPCNGVEGFNCYFPLQSYGFQPTNGVGYQPYRVVVLSFELAHAPATVCGPKKSTHHHHHHHH

SEQ ID NO: 6159 - protein, 244 aa, Artificial Sequence
  Description of Artificial Sequence: Synthetic polypeptide
MGILPSPGMPALLSLVSLLSVLLMGCVAETGTRFPNITNLCPFGEVFNATRFASVYAWNRKRISNCVADYSVLYNSASFSTFKCYGVSPTKLNDLCFTNVYADSFVIRGDEVRQIAPGQTGKIADYNYKLPDDFTGCVIAWNSNNLDSKVGGNYNYLYRLFRKSNLKPFERDISTEIYQAGSTPCNGVEGFNCYFPLQSYGFQPTNGVGYQPYRVVVLSFELQHAPATVCGPKKSTHHHHHHHH

SEQ ID NO: 6160 - protein, 244 aa, Artificial Sequence
  Description of Artificial Sequence: Synthetic polypeptide
MGILPSPGMPALLSLVSLLSVLLMGCVAETGTRFPNITNLCPFGEVFNATRFASVYAWNRKRISNCVADYSVLYNSASFSTFKCYGVSPTKLNDLCFTNVYADSFVIRGDEVRQIAPGQTGKIADYNYKLPDDFTGCVIAWNSNNLDSKVGGNYNYLYRLFRKSNLKPFERDISTEIYQAGSTPCNGVEGFNCYFPLQSYAFQPTNGVGYQPYRVVVLSFELLHAPATVCGPKKSTHHHHHHHH

SEQ ID NO: 6161 - protein, 244 aa, Artificial Sequence
  Description of Artificial Sequence: Synthetic polypeptide
MGILPSPGMPALLSLVSLLSVLLMGCVAETGTRFPNITNLCPFGEVFNATRFASVYAWNRKRISNCVADYSVLYNSASFSTFKCYGVSPTKLNDLCFTNVYADSFVIRGDEVRQIAPGQTGKIADYNYLLPDDFTGCVIAWNSNNLDSKVGGNYNYLYRLFRKSNLKPFERDISTEIYQAGSTPCNGVEGFNCYFPLQSYGFQPTNGVGYQPYRVVVLSFELLHAPATVCGPKKSTHHHHHHHH

SEQ ID NO: 6162 - protein, 244 aa, Artificial Sequence
  Description of Artificial Sequence: Synthetic polypeptide
MGILPSPGMPALLSLVSLLSVLLMGCVAETGTRFPNITNLCPFGEVFNATRFASVYAWNRKRISNCVADYSVLYNSASFSTFKCYGVSPTKLNDLCFTNVYADSFVIRGDEVRQIAPGQTGKIADYNYKLPDDFTGCVIAWNSNNLDSKVGGNYNYLYRLFRKSNLKPFERDISTEIYQAGSTPSNGVEGFNCYFPLQSYGFQPTNGVGYQPYRVVVLSFELLHAPATVCGPKKSTHHHHHHHH

SEQ ID NO: 6163 - protein, 244 aa, Artificial Sequence
  Description of Artificial Sequence: Synthetic polypeptide
MGILPSPGMPALLSLVSLLSVLLMGCVAETGTRFPNITNLCPFGEVFNATRFASVYAWNRKRISNCVADYSNLYNSASFSTFKCYGVSPTKLNDLCFTNVYADSFVIRGDEVRQIAPGQTGKIADYNYKLPDDFTGCVIAWNSNNLDSKVGGNYNYLYRLFRKSNLKPFERDISTEIYQAGSTPCNGVEGFNCYFPLQSYGFQPTNGVGYQPYRVVVLSFELLHAPATVCGPKKSTHHHHHHHH

SEQ ID NO: 6164 - protein, 244 aa, Artificial Sequence
  Description of Artificial Sequence: Synthetic polypeptide
MGILPSPGMPALLSLVSLLSVLLMGCVAETGTRFPNITNLCPFGEVFNATRFASVYAWNRKRISNCVADYSVLYESASFSTFKCYGVSPTKLNDLCFTNVYADSFVIRGDEVRQIAPGQTGKIADYNYKLPDDFTGCVIAWNSNNLDSKVGGNYNYLYRLFRKSNLKPFERDISTEIYQAGSTPCNGVEGFNCYFPLQSYGFQPTNGVGYQPYRVVVLSFELLHAPATVCGPKKSTHHHHHHHH

SEQ ID NO: 6165 - protein, 244 aa, Artificial Sequence
  Description of Artificial Sequence: Synthetic polypeptide
MGILPSPGMPALLSLVSLLSVLLMGCVAETGTRFPNITNLCPFGEVFNATRFASVYAWNRKRISNCVADYSVLYNSASFSTFKCYGVSPTKLNDLCFTNVYADSFVIRGDEVRQIAPGQTGKIADYNYKLPDDFTGCVIAWNSNNLDSKVGGNYNYLYRLFRKSNLKPFERDISTEIYQAGSTPCNGVEGFNCYFPLQSYGFQPTNGVGYQPYRVVVLSFELLSAPATVCGPKKSTHHHHHHHH

SEQ ID NO: 6166 - protein, 244 aa, Artificial Sequence
  Description of Artificial Sequence: Synthetic polypeptide
MGILPSPGMPALLSLVSLLSVLLMGCVAETGTRFPNITNLCPFGEVFNATRFASVYAWNRKRISNCVADYSVLYNSASFSTFKCYGVSPTKLNDLCFTNVYADSFVIRGDEVRQIAPGQTGKIADYNYKLPDDFTGCVIAWNSNNLDSKVGGNYNYLYRLFRKSNLKPFERDISTEYYQAGSTPCNGVEGFNCYFPLQSYGFQPTNGVGYQPYRVVVLSFELLHAPATVCGPKKSTHHHHHHHH

SEQ ID NO: 6167 - protein, 244 aa, Artificial Sequence
  Description of Artificial Sequence: Synthetic polypeptide
MGILPSPGMPALLSLVSLLSVLLMGCVAETGTRFPNITNLCPFGEVFNATRFASVYAWNRKRISNCVADYSVLYNSASFSTFKCYGVSPTKLNDLCFPNVYADSFVIRGDEVRQIAPGQTGKIADYNYKLPDDFTGCVIAWNSNNLDSKVGGNYNYLYRLFRKSNLKPFERDISTEIYQAGSTPCNGVEGFNCYFPLQSYGFQPTNGVGYQPYRVVVLSFELLHAPATVCGPKKSTHHHHHHHH

SEQ ID NO: 6168 - protein, 244 aa, Artificial Sequence
  Description of Artificial Sequence: Synthetic polypeptide
MGILPSPGMPALLSLVSLLSVLLMGCVAETGTRFPNITNLCPFGEVFNATRFASVYAWNRKRISNCVADYSVLYNSASFSTFKCYGVSPTKLNDLCFTNVYADSFVIRGDEVRQIAPGQTGKIADYNYKLPDDFTGCVIAWNSNNLDSKVGGNYNYLYRLFRKSNLKPFERDISTEIYQAGSTPCNGVEGFNCYFPLQSYGFQPTNGVGYQPYRVVVLNFELLHAPATVCGPKKSTHHHHHHHH

SEQ ID NO: 6169 - protein, 244 aa, Artificial Sequence
  Description of Artificial Sequence: Synthetic polypeptide
MGILPSPGMPALLSLVSLLSVLLMGCVAETGTRFPNITNLCPFGEVFNATRFASVYNWNRKRISNCVADYSVLYNSASFSTFKCYGVSPTKLNDLCFTNVYADSFVIRGDEVRQIAPGQTGKIADYNYKLPDDFTGCVIAWNSNNLDSKVGGNYNYLYRLFRKSNLKPFERDISTEIYQAGSTPCNGVEGFNCYFPLQSYGFQPTNGVGYQPYRVVVLSFELLHAPATVCGPKKSTHHHHHHHH

SEQ ID NO: 6170 - protein, 244 aa, Artificial Sequence
  Description of Artificial Sequence: Synthetic polypeptide
MGILPSPGMPALLSLVSLLSVLLMGCVAETGTRFPNITNLCPFGEVFNATRFASVYAWNRKRISNCVADYSVLYNSASFSTFKCYGVSPTKLNDLCFTNVYADSFVIRGDEVRQIAPGQTGKIADYNYKLPDDFTGCVIAWNSNELDSKVGGNYNYLYRLFRKSNLKPFERDISTEIYQAGSTPCNGVEGFNCYFPLQSYGFQPTNGVGYQPYRVVVLSFELLHAPATVCGPKKSTHHHHHHHH

SEQ ID NO: 6171 - protein, 244 aa, Artificial Sequence
  Description of Artificial Sequence: Synthetic polypeptide
MGILPSPGMPALLSLVSLLSVLLMGCVAETGTRFPNITNLCPFGEVFNATRFASVYAWNRKRISNCVADYSVLYNSASFSTFKCYGVSPTKLNDLCFTNVYADSFVIRGDEVRQIAPGQTGKIADYNYKLPDDFTGCVIAWNSNNLDSKVGGNYNYLYRLFRKSNLCPFERDISTEIYQAGSTPCNGVEGFNCYFPLQSYGFQPTNGVGYQPYRVVVLSFELLHAPATVCGPKKSTHHHHHHHH

SEQ ID NO: 6172 - protein, 244 aa, Artificial Sequence
  Description of Artificial Sequence: Synthetic polypeptide
MGILPSPGMPALLSLVSLLSVLLMGCVAETGTRFPNITNLCPFGEVFNATRFASVYAWNRKRISNCVADYSVLYNSASFSTFKCYGVSPTKLNDLCFTNVYADSFVIRGDEVRQIAPGQTGKIADYNYKLPDDFTGCVIAWNSNNLDSKVGGNYNYLYRLFRKSNLKPFERDISTEDYQAGSTPCNGVEGFNCYFPLQSYGFQPTNGVGYQPYRVVVLSFELLHAPATVCGPKKSTHHHHHHHH

SEQ ID NO: 6173 - protein, 244 aa, Artificial Sequence
  Description of Artificial Sequence: Synthetic polypeptide
MGILPSPGMPALLSLVSLLSVLLMGCVAETGTRFPNITNLCPFGEVFNATRFASVYAWNRKRMSNCVADYSVLYNSASFSTFKCYGVSPTKLNDLCFTNVYADSFVIRGDEVRQIAPGQTGKIADYNYKLPDDFTGCVIAWNSNNLDSKVGGNYNYLYRLFRKSNLKPFERDISTEIYQAGSTPCNGVEGFNCYFPLQSYGFQPTNGVGYQPYRVVVLSFELLHAPATVCGPKKSTHHHHHHHH

SEQ ID NO: 6174 - protein, 244 aa, Artificial Sequence
  Description of Artificial Sequence: Synthetic polypeptide
MGILPSPGMPALLSLVSLLSVLLMGCVAETGTRFPNITNLCPFGEVFNATRFASVYAWNRKRISNCVADYSVLYNSASFSTFKCYGVSPTKLNDLCFTNVYADSFVIRGDEVRQIAPGQTGKIADYNYKLPDDFTGCVIAWNSNNLDSKVGGNYNYLYRLFRKSNLKPFERDISTEIYQAGSTPGNGVEGFNCYFPLQSYGFQPTNGVGYQPYRVVVLSFELLHAPATVCGPKKSTHHHHHHHH

SEQ ID NO: 6175 - protein, 244 aa, Artificial Sequence
  Description of Artificial Sequence: Synthetic polypeptide
MGILPSPGMPALLSLVSLLSVLLMGCVAETGTRFPNITNLCPFGEVFNATRFASVYAWNRKRISNCVADYSVLYNSASFSTFKCYGVSPTKLNDLCFTNVYADSFVIRGDEVRQIAPGQTGKIADYNYKLPDDFTGCVIAWNSNNLDSKVGGNYNYLYRLFRKSNLKPFERDILTEIYQAGSTPCNGVEGFNCYFPLQSYGFQPTNGVGYQPYRVVVLSFELLHAPATVCGPKKSTHHHHHHHH

SEQ ID NO: 6176 - protein, 244 aa, Artificial Sequence
  Description of Artificial Sequence: Synthetic polypeptide
MGILPSPGMPALLSLVSLLSVLLMGCVAETGTRFPNITNLCPFGEVFNATRFASVYAWNRKRISNCVADYSVLYNSASFSTFKCYGVSPTKLNDLCFTNVYADSFVIRGDEVRQIAPGQTGKIADYNYKLPDDFTGCVIAWNSNNLDSKVGGNYNYLYRLFRKSNLKPFERDISMEIYQAGSTPCNGVEGFNCYFPLQSYGFQPTNGVGYQPYRVVVLSFELLHAPATVCGPKKSTHHHHHHHH

SEQ ID NO: 6177 - protein, 244 aa, Artificial Sequence
  Description of Artificial Sequence: Synthetic polypeptide
MGILPSPGMPALLSLVSLLSVLLMGCVAETGTRFPNITNLCPFGEVFNATRFASVYAWNRKRISNCVADYSVLYNSASFSTFKCYGVSPTKLNDLCFTNVYADSFVIRGDEVRQIAPGQTGKIADYNYKLPDDFTGCVIAWNSNNLDSKVGGNYNYLYRLFRKSNLEPFERDISTEIYQAGSTPCNGVEGFNCYFPLQSYGFQPTNGVGYQPYRVVVLSFELLHAPATVCGPKKSTHHHHHHHH

SEQ ID NO: 6178 - protein, 244 aa, Artificial Sequence
  Description of Artificial Sequence: Synthetic polypeptide
MGILPSPGMPALLSLVSLLSVLLMGCVAETGTRFPNITNLCPFGEVFNATRFASVYAWNRKRISNCVADYSVLYNSASFSTFKCYGVSPTKLNDLCFTNVYADSFVIRGDEVRQIAPGQTGKVADYNYKLPDDFTGCVIAWNSNNLDSKVGGNYNYLYRLFRKSNLKPFERDISTEIYQAGSTPCNGVEGFNCYFPLQSYGFQPTNGVGYQPYRVVVLSFELLHAPATVCGPKKSTHHHHHHHH

SEQ ID NO: 6179 - protein, 244 aa, Artificial Sequence
  Description of Artificial Sequence: Synthetic polypeptide
MGILPSPGMPALLSLVSLLSVLLMGCVAETGTRFPNITNLCPFGEVFNATRFASVYAWNRKRISNCVADYSVLYNSASFSTFKCYGVSPTKLNDLCFTNVYADSFVIRGDEVRQIAPGQTGKIADYNYKLPDDFTGCVIAWNSNNLDSKVGGNYNYLYRLFRKSNLKPFERDISTAIYQAGSTPCNGVEGFNCYFPLQSYGFQPTNGVGYQPYRVVVLSFELLHAPATVCGPKKSTHHHHHHHH

SEQ ID NO: 6180 - protein, 244 aa, Artificial Sequence
  Description of Artificial Sequence: Synthetic polypeptide
MGILPSPGMPALLSLVSLLSVLLMGCVAETGTRFPNITNLCPFGEVFNATRFASVYAWNRKRISNCVADYSVLYNSASFSTFKCYGVSPTKLNDLCFTNVYADSFVIRGDEVRQIAPGQTGKIADYNYKLPDDFTGCVIAWNSNNLDSKVGGNYNYLYRLFRKSNLKPFERDISTEIYQAGSTPCNGVEGFNCYFPLQSYGFQPTNGVGYQPYRVVVLSFELLCAPATVCGPKKSTHHHHHHHH

SEQ ID NO: 6181 - protein, 244 aa, Artificial Sequence
  Description of Artificial Sequence: Synthetic polypeptide
MGILPSPGMPALLSLVSLLSVLLMGCVAETGTRFPNITNLCPFGEVFNATRFASVYAWNRKRISNCVADYSVLYNSASFSTFKCYGVSPTKLNDLCFTNVYADSFVIRGDEVRQIAPGQTGKIADYNYKLPDDFTGCVIAWNSNNLDSKVGGNYNYLYRLFRKSNLKPFERDISTEIYQAGSTVCNGVEGFNCYFPLQSYGFQPTNGVGYQPYRVVVLSFELLHAPATVCGPKKSTHHHHHHHH

SEQ ID NO: 6182 - protein, 244 aa, Artificial Sequence
  Description of Artificial Sequence: Synthetic polypeptide
MGILPSPGMPALLSLVSLLSVLLMGCVAETGTRFPNITNLCPFGEVFNATRFASVYAWNRKRISNCVADYSVLYNSASFSTFKCYGVSPTKLNDLCFTNVYADSFVIRGDEVRQIAPGQTGKIADYNYKLPDDFTGCVIAWNSNNLDSKVGGNYNYLYRLFRKSNLKPFERDISTSIYQAGSTPCNGVEGFNCYFPLQSYGFQPTNGVGYQPYRVVVLSFELLHAPATVCGPKKSTHHHHHHHH

SEQ ID NO: 6183 - protein, 244 aa, Artificial Sequence
  Description of Artificial Sequence: Synthetic polypeptide
MGILPSPGMPALLSLVSLLSVLLMGCVAETGTRFPNITNLCPFGEVFNATRFASVYAWNRKRISNCVADYSVLYNSASFSTFKCYGVSPTKLNDLCFTNVYADSFVIRGDEVRQIAPGQTGKIADYNYKLPDDFTGCVIAWNSNNLDSKVGGNYNYLYRLFRKSNLQPFERDISTEIYQAGSTPCNGVEGFNCYFPLQSYGFQPTNGVGYQPYRVVVLSFELLHAPATVCGPKKSTHHHHHHHH

SEQ ID NO: 6184 - protein, 244 aa, Artificial Sequence
  Description of Artificial Sequence: Synthetic polypeptide
MGILPSPGMPALLSLVSLLSVLLMGCVAETGTRFPNITNLCPFGEVFNATRFASVYAWNRKRISNCVADYSVLYNSASFSTFKCYGVSPTKLNDLCFTNVYADSFVIRGDEVRQIAPGQTGKIADYNYKLPDDFTGCVIAWNSNNLDSKVGGNYNYLYRLFRKSNLKPFERDISTEIYQAGSTPCNGVEGFNCYFPLQSYGFQPTNGVGYQPYRVVVLSFELLYAPATVCGPKKSTHHHHHHHH

SEQ ID NO: 6185 - protein, 244 aa, Artificial Sequence
  Description of Artificial Sequence: Synthetic polypeptide
MGILPSPGMPALLSLVSLLSVLLMGCVAETGTRFPNITNLCPFGEVFNATRFASVYAWNRKRISNCVADMSVLYNSASFSTFKCYGVSPTKLNDLCFTNVYADSFVIRGDEVRQIAPGQTGKIADYNYKLPDDFTGCVIAWNSNNLDSKVGGNYNYLYRLFRKSNLKPFERDISTEIYQAGSTPCNGVEGFNCYFPLQSYGFQPTNGVGYQPYRVVVLSFELLHAPATVCGPKKSTHHHHHHHH

SEQ ID NO: 6186 - protein, 244 aa, Artificial Sequence
  Description of Artificial Sequence: Synthetic polypeptide
MGILPSPGMPALLSLVSLLSVLLMGCVAETGTRFPNITNLCPFGEVFNATRFASVYAWNRKRVSNCVADYSVLYNSASFSTFKCYGVSPTKLNDLCFTNVYADSFVIRGDEVRQIAPGQTGKIADYNYKLPDDFTGCVIAWNSNNLDSKVGGNYNYLYRLFRKSNLKPFERDISTEIYQAGSTPCNGVEGFNCYFPLQSYGFQPTNGVGYQPYRVVVLSFELLHAPATVCGPKKSTHHHHHHHH

SEQ ID NO: 6187 - protein, 244 aa, Artificial Sequence
  Description of Artificial Sequence: Synthetic polypeptide
MGILPSPGMPALLSLVSLLSVLLMGCVAETGTRFPNITNLCPFGEVFNATRFASVYAWNRKRISNCVADYSVLYNSASFSTFKCYGVSPTKLNDLCFTNVYADSFVIRGDEVRQIAPGQTGKIADYNYKLPDDFTGCVIAWNSNNLDSKVGGNYNYLYRLFRKSNLKPFRRDISTEIYQAGSTPCNGVEGFNCYFPLQSYGFQPTNGVGYQPYRVVVLSFELLHAPATVCGPKKSTHHHHHHHH

SEQ ID NO: 6188 - protein, 244 aa, Artificial Sequence
  Description of Artificial Sequence: Synthetic polypeptide
MGILPSPGMPALLSLVSLLSVLLMGCVAETGTRFPNITNLCPFGEVFNATRFASVYAWNRKRISNCVADYSVLYNSASFSTFKCYGVSPTKLNDLCFTNVYADSFVIRGDEVRQIAPGQTGKIADYNYKLPDDFTGCVIAWNSNNLDSKVGGNYNYLYRLFRKSNLKPFERDISTEIYQAGSTPCNGVEGFNCYFPLQSYGFQPTNGVGYQPYRVVVLSFELTHAPATVCGPKKSTHHHHHHHH

SEQ ID NO: 6189 - protein, 244 aa, Artificial Sequence
  Description of Artificial Sequence: Synthetic polypeptide
MGILPSPGMPALLSLVSLLSVLLMGCVAETGTRFPNITNLCPFGEVFNATRFASVYAWNRKRISNCVADYSVLYNSASFSTFKCYGVSPTKLNDLCFTNVYADSFVIRGDEVRQIAPGQTGKIADYNYKLPDDFTGCVIAWNSNNLDSKVGGNYNYLYRLFRKSNLKPFEQDISTEIYQAGSTPCNGVEGFNCYFPLQSYGFQPTNGVGYQPYRVVVLSFELLHAPATVCGPKKSTHHHHHHHH

SEQ ID NO: 6190 - protein, 244 aa, Artificial Sequence
  Description of Artificial Sequence: Synthetic polypeptide
MGILPSPGMPALLSLVSLLSVLLMGCVAETGTRFPNITNLCPFGEVFNATRFASVYAWNRKRISNCVADYRVLYNSASFSTFKCYGVSPTKLNDLCFTNVYADSFVIRGDEVRQIAPGQTGKIADYNYKLPDDFTGCVIAWNSNNLDSKVGGNYNYLYRLFRKSNLKPFERDISTEIYQAGSTPCNGVEGFNCYFPLQSYGFQPTNGVGYQPYRVVVLSFELLHAPATVCGPKKSTHHHHHHHH

SEQ ID NO: 6191 - protein, 244 aa, Artificial Sequence
  Description of Artificial Sequence: Synthetic polypeptide
MGILPSPGMPALLSLVSLLSVLLMGCVAETGTRFPNITNLCPFGEVFNATRFASVYAWNRKRISNCVADYSVLYNSASFSTFKCYGVSPTKLNDLCFTNVYADSFVIRGDEVRQIAPGQTGKIADYNYKLPDDFTGCVIAWNSNNLDSKVGGNYNYLYRLFRKSNLKPFERNISTEIYQAGSTPCNGVEGFNCYFPLQSYGFQPTNGVGYQPYRVVVLSFELLHAPATVCGPKKSTHHHHHHHH

SEQ ID NO: 6192 - protein, 244 aa, Artificial Sequence
  Description of Artificial Sequence: Synthetic polypeptide
MGILPSPGMPALLSLVSLLSVLLMGCVAETGTRFPNITNLCPFGEVFNATRFASVYAWNRKRISNCVADYSVLYNSASFSTFKCYGVSPTKLNDLCFTNVYADSFVIRGDEVRQIAPGQTGKIADYNYKLPDDFTGCVIAWNSNNLDSKVGGNYNYLYRLFRKSNLKPFERDISTKIYQAGSTPCNGVEGFNCYFPLQSYGFQPTNGVGYQPYRVVVLSFELLHAPATVCGPKKSTHHHHHHHH

SEQ ID NO: 6193 - protein, 244 aa, Artificial Sequence
  Description of Artificial Sequence: Synthetic polypeptide
MGILPSPGMPALLSLVSLLSVLLMGCVAETGTRFPNITNLCPFGEVFNATRFASVYAWNRKRISNCVADYSVLYNSASFSTFKCYGVSPTKLNDLCFTNVYADSFVIRGDEVRQIAPGQTGKIADYNYKLPDDFTGCVIAWNSNNLDSKVGGNYNYLYRLFRKSNLKPFERDISTEMYQAGSTPCNGVEGFNCYFPLQSYGFQPTNGVGYQPYRVVVLSFELLHAPATVCGPKKSTHHHHHHHH

SEQ ID NO: 6194 - protein, 244 aa, Artificial Sequence
  Description of Artificial Sequence: Synthetic polypeptide
MGILPSPGMPALLSLVSLLSVLLMGCVAETGTRFPNITNLCPFGEVFNATRFASVYAWNRKRISNCVADYSVLYNSASFSTFKCYGVSPTKLNDLCFTNVYADSFVIRGDEVRQIAPGQTGKIADYNYKLPDDFTGCVIAWNSNNLDSKVGGNYNYLYRLFRKSNLKPFERDISTEIYQAGSTPCNGVEGFNCYFPLQSYGFQPTNGVGYQPYRVVVLSFELLNAPATVCGPKKSTHHHHHHHH

SEQ ID NO: 6195 - protein, 244 aa, Artificial Sequence
  Description of Artificial Sequence: Synthetic polypeptide
MGILPSPGMPALLSLVSLLSVLLMGCVAETGTRFPNITNLCPFGEVFNATRFASVYAWNRKRISNCVADYSVLYNSASFSTFKCYGVSPTKLNDLCFTNVYADSFVIRGDEVRQIAPGQTGKIADYNYKLPDDFTGCVIAWNSNNLDSKVGGNYNYLYRLFRKSNLKPFERDISTEIYQAGSTPCNGVEGFNCYFPLQSYTFQPTNGVGYQPYRVVVLSFELLHAPATVCGPKKSTHHHHHHHH

SEQ ID NO: 6196 - protein, 244 aa, Artificial Sequence
  Description of Artificial Sequence: Synthetic polypeptide
MGILPSPGMPALLSLVSLLSVLLMGCVAETGTRFPNITNLCPFGEVFNATRFASVYAWNRKRISNCVADYSVLYNSASFSTFKCYGVSPTKLNDLCFTNVYADSFVIRGDEVRQIAPGQTGKIADYNYKLPDDFTGCVIAWNSNNLDSKVGGNYNYLYRLFRKSNRKPFERDISTEIYQAGSTPCNGVEGFNCYFPLQSYGFQPTNGVGYQPYRVVVLSFELLHAPATVCGPKKSTHHHHHHHH

SEQ ID NO: 6197 - protein, 244 aa, Artificial Sequence
  Description of Artificial Sequence: Synthetic polypeptide
MGILPSPGMPALLSLVSLLSVLLMGCVAETGTRFPNITNLCPFGEVFNATRFASVYAWNRKRISNCVADYSVLYNSASFSTFKCYGVSPTKLNDLCFTNVYADSFVIRGDEVRQIAPGQTGKIADYNYKLPDDFTGCVIAWNSNNLDSKVGGNYNYLYRLFRKSNLKPFERDISTEIYQAGSTPCNGVEGFNCYFPLQSYGFQPTNGVGYQPYRVVVLSFELLRAPATVCGPKKSTHHHHHHHH

SEQ ID NO: 6198 - protein, 244 aa, Artificial Sequence
  Description of Artificial Sequence: Synthetic polypeptide
MGILPSPGMPALLSLVSLLSVLLMGCVAETGTRFPNITNLCPFGEVFNATRFASVYAWNRKRISNCVADYSVLYNSASFSTFKCYGVSPTKLNDLCFTNVYADSFVIRGDEVRQIAPGQTGKIADYNYKLPDDFTGCVIAWNSNNLDSKVGGNYNYLYRLFRKSNLKPFERDISLEIYQAGSTPCNGVEGFNCYFPLQSYGFQPTNGVGYQPYRVVVLSFELLHAPATVCGPKKSTHHHHHHHH

SEQ ID NO: 6199 - protein, 244 aa, Artificial Sequence
  Description of Artificial Sequence: Synthetic polypeptide
MGILPSPGMPALLSLVSLLSVLLMGCVAETGTRFPNITNLCPFGEVFNATRFASVYAWNRKRISNCVADYSVLYNSASFSTFKCYGVSPTKLNDLCFTNVYADSFVIRGDEVRQIAPGQTGKIADYNYKLPDDFTGCVIAWNSNNLDSKVGGNYNYLYRLFRKSNLKPFERDISHEIYQAGSTPCNGVEGFNCYFPLQSYGFQPTNGVGYQPYRVVVLSFELLHAPATVCGPKKSTHHHHHHHH

SEQ ID NO: 6200 - protein, 244 aa, Artificial Sequence
  Description of Artificial Sequence: Synthetic polypeptide
MGILPSPGMPALLSLVSLLSVLLMGCVAETGTRFPNITNLCPFGEVFNATRFASVYAWNRKRISNCVADYSVLYNSASFSTFKCYGVSPTKLNDLCFTNVYADSFVIRGDEVRQIAPGQTGKIADYNYKLPDDFTGCVIAWNSNNLDSKVGGNYNYLYRLFRKSNLKPFKRDISTEIYQAGSTPCNGVEGFNCYFPLQSYGFQPTNGVGYQPYRVVVLSFELLHAPATVCGPKKSTHHHHHHHH

SEQ ID NO: 6201 - protein, 244 aa, Artificial Sequence
  Description of Artificial Sequence: Synthetic polypeptide
MGILPSPGMPALLSLVSLLSVLLMGCVAETGTRFPNITNLCPFGEVFNATRFASVYAWNRKRISNCVADYSVLYNSASFSTFKCYGVSPTKLNDLCFTNVYADSFVIRGDEVRQIAPGQTGKIADYNYKLPDDFTGCVIAWNSNNLDSKVGGNYNYLYRLFRKSNLKPFERDISTEIYQAGSTPCNGVEGFNCYFPLQSYGFQPTNGVGYQPYRVVVLTFELLHAPATVCGPKKSTHHHHHHHH

SEQ ID NO: 6202 - protein, 244 aa, Artificial Sequence
  Description of Artificial Sequence: Synthetic polypeptide
MGILPSPGMPALLSLVSLLSVLLMGCVAETGTRFPNITNLCPFGEVFNATRFASVYAWNRKRISNCVADYSVLYNSASFSTFKCYGVSPTKLNDLCFTNVYADSFVIRGDEVRQIAPGQTGKIADYNYKLPDDFTGCVIAWNSNNLDSKVGGNYNYLYRLFRKSNLKPFERDISTEIYQAGSTPCNGVEGFNCYFALQSYGFQPTNGVGYQPYRVVVLSFELLHAPATVCGPKKSTHHHHHHHH

SEQ ID NO: 6203 - protein, 244 aa, Artificial Sequence
  Description of Artificial Sequence: Synthetic polypeptide
MGILPSPGMPALLSLVSLLSVLLMGCVAETGTRFPNITNLCPFGEVFNATRFASVYAWNRKRISNCVADYSVLYNSASFSTFKCYGVSPTKLNDLCFTNVYADSFVIRGDEVRQIAPGQTGKIADYNYKLPDDFTGCVIAWNSNNLDSKVGGNYNYLYRLFRKSNLAPFERDISTEIYQAGSTPCNGVEGFNCYFPLQSYGFQPTNGVGYQPYRVVVLSFELLHAPATVCGPKKSTHHHHHHHH

SEQ ID NO: 6204 - protein, 244 aa, Artificial Sequence
  Description of Artificial Sequence: Synthetic polypeptide
MGILPSPGMPALLSLVSLLSVLLMGCVAETGTRFPNITNLCPFGEVFNATRFASVYAWNRKRISNCVADYSVLYNSASFSTFKCYGVSPTKLNDLCFTNVYADSFVIRGDEVRQIAPGQTGKIADYNYKLPDDFTGCVIAWNSNNLDSKVGGNYNYLYRLFRKSNLKPFERDISTEIYQAGSTPCNGVEGFNCYFPLQSYGFQPTNGVGYQPYRVVVLSFELLKAPATVCGPKKSTHHHHHHHH

SEQ ID NO: 6205 - protein, 244 aa, Artificial Sequence
  Description of Artificial Sequence: Synthetic polypeptide
MGILPSPGMPALLSLVSLLSVLLMGCVAETGTRFPNITNLCPFGEVFNATRFASVYAWNRKRISNCVADYSVLYNSASFSTFKCYGVSPTKLNDLCFTNVYADSFVIRGDEVRQIAPGQTGKIADYNYKLPDDFTGCVIAWNSNNLDSKVGGNYNYLYRLFRKSNLKPFERDISTEIYQAGSTPCNGVEGFNCYFPLQSYGFQPTNGVGYQPYRVVVLSFELLLAPATVCGPKKSTHHHHHHHH

SEQ ID NO: 6206 - protein, 244 aa, Artificial Sequence
  Description of Artificial Sequence: Synthetic polypeptide
MGILPSPGMPALLSLVSLLSVLLMGCVAETGTRFPNITNLCPFGEVFNATRFASVYAWNRKRISNCVADYSVLYNSASFSTFKCYGVSPTKLNDLCFTNVYADSFVIRGDEVRQIAPGQTGKIADYNYKLPDDFTGCVIAWNSNNLDSKVGGNYNYLYRLFRKSNLKPFERDISTEIYQAGSTPCNGVEGFNCYFPLQSYGFQPTNGVGYQPYRVVVLSFELLDAPATVCGPKKSTHHHHHHHH

SEQ ID NO: 6207 - protein, 244 aa, Artificial Sequence
  Description of Artificial Sequence: Synthetic polypeptide
MGILPSPGMPALLSLVSLLSVLLMGCVAETGTRFPNITNLCPFGEVFNATRFASVYAWNRKRISNCVADYSVLYASASFSTFKCYGVSPTKLNDLCFTNVYADSFVIRGDEVRQIAPGQTGKIADYNYKLPDDFTGCVIAWNSNNLDSKVGGNYNYLYRLFRKSNLKPFERDISTEIYQAGSTPCNGVEGFNCYFPLQSYGFQPTNGVGYQPYRVVVLSFELLHAPATVCGPKKSTHHHHHHHH

SEQ ID NO: 6208 - protein, 244 aa, Artificial Sequence
  Description of Artificial Sequence: Synthetic polypeptide
MGILPSPGMPALLSLVSLLSVLLMGCVAETGTRFPNITNLCPFGEVFNATRFASVYAWNRKRISNCVADYSVLYNSASFSTFKCYGVSPTKLNDLCFTNVYADRFVIRGDEVRQIAPGQTGKIADYNYKLPDDFTGCVIAWNSNNLDSKVGGNYNYLYRLFRKSNLKPFERDISTEIYQAGSTPCNGVEGFNCYFPLQSYGFQPTNGVGYQPYRVVVLSFELLHAPATVCGPKKSTHHHHHHHH

SEQ ID NO: 6209 - protein, 244 aa, Artificial Sequence
  Description of Artificial Sequence: Synthetic polypeptide
MGILPSPGMPALLSLVSLLSVLLMGCVAETGTRFPNITNLCPFGEVFNATRFASVYAWNRKRISNCVADYSVLYNSASFSTFKCYGVSPTKLNDLCFTNVYADSFVIRGDEVRQIAPGQTGKIADYNYKLPDDFTGCVIAWNSNNLDAKVGGNYNYLYRLFRKSNLKPFERDISTEIYQAGSTPCNGVEGFNCYFPLQSYGFQPTNGVGYQPYRVVVLSFELLHAPATVCGPKKSTHHHHHHHH

SEQ ID NO: 6210 - protein, 244 aa, Artificial Sequence
  Description of Artificial Sequence: Synthetic polypeptide
MGILPSPGMPALLSLVSLLSVLLMGCVAETGTRFPNITNLCPFGEVFNATRFASVYAWNRKRISNCVADYSVLYNSASFSTFKCYGVSPTKLNDLCFTNVYADSFVIRGDEVRQIAPGQTGKIADYNYKLPDDFTGCVIAWNSNNLDSKVGGNYNYLYRLFRKSNLKPFERDISTNIYQAGSTPCNGVEGFNCYFPLQSYGFQPTNGVGYQPYRVVVLSFELLHAPATVCGPKKSTHHHHHHHH

SEQ ID NO: 6211 - protein, 244 aa, Artificial Sequence
  Description of Artificial Sequence: Synthetic polypeptide
MGILPSPGMPALLSLVSLLSVLLMGCVAETGTRFPNITNLCPFGEVFNATRFASVYAWNRKRISNCVADYSVLYNSASFSTFKCYGVSPTKLNDLCFTNVYADSFVIRGDEVRQIAPGQTGKIADYNYKLPDDFTGCVIAWNSNNLDSKVGGNYNYLYRLFRKSNLKPFERDISTEIYQAGSTPCNGVEGFNCYFPLQSYGFQPTNGVGYQPYRVVVLVFELLHAPATVCGPKKSTHHHHHHHH

SEQ ID NO: 6212 - protein, 244 aa, Artificial Sequence
  Description of Artificial Sequence: Synthetic polypeptide
MGILPSPGMPALLSLVSLLSVLLMGCVAETGTRFPNITNLCPFGEVFNATRFASVYAWNRKRISNCVADYSVLYNSASFSTFKCYGVSPTKLNDLCFTNVYADSFVIRGDEVRQIAPGQTGKIHDYNYKLPDDFTGCVIAWNSNNLDSKVGGNYNYLYRLFRKSNLKPFERDISTEIYQAGSTPCNGVEGFNCYFPLQSYGFQPTNGVGYQPYRVVVLSFELLHAPATVCGPKKSTHHHHHHHH

SEQ ID NO: 6213 - protein, 244 aa, Artificial Sequence
  Description of Artificial Sequence: Synthetic polypeptide
MGILPSPGMPALLSLVSLLSVLLMGCVAETGTRFPNITNLCPFGEVFNATRFASVYAWNRKRISNCVADYSVLYNSASFSTFKCYGVSPTKLNDLCFTNVYADSFVIRGDEVRQIAPGQTGKIADYNYKLPDDFTGCVIAWNSNNLDSKVGGNYNYLYRLFRKSNLDPFERDISTEIYQAGSTPCNGVEGFNCYFPLQSYGFQPTNGVGYQPYRVVVLSFELLHAPATVCGPKKSTHHHHHHHH

SEQ ID NO: 6214 - protein, 244 aa, Artificial Sequence
  Description of Artificial Sequence: Synthetic polypeptide
MGILPSPGMPALLSLVSLLSVLLMGCVAETGTRFPNITNLCPFGEVFNATRFASVYAWNRKRISNCVADYSVLYNSASFSTFKCYGVSPTKLNDLCFTNVYADSFVIRGDEVRQIAPGQTGKIADYNYKLPDDFTGCVIAWNSNNLDSKVGGNYNYLYRLFRKSNLKPFERDISNEIYQAGSTPCNGVEGFNCYFPLQSYGFQPTNGVGYQPYRVVVLSFELLHAPATVCGPKKSTHHHHHHHH

SEQ ID NO: 6215 - protein, 244 aa, Artificial Sequence
  Description of Artificial Sequence: Synthetic polypeptide
MGILPSPGMPALLSLVSLLSVLLMGCVAETGTRFPNITNLCPFGEVFNATRFASVYAWNRKRISNCVADYSVLYNSASFSTFKCYGVSPTKLNDLCFTNVYADSFVIRGDEVRQIAPGQTGKIADYNYKLPDDFTGCVIAWNSNNLDSKVGGNYNYLYRLFRKSNLKPFERDISTEIYQAGSTPCNGVEGFNSYFPLQSYGFQPTNGVGYQPYRVVVLSFELLHAPATVCGPKKSTHHHHHHHH

SEQ ID NO: 6216 - protein, 244 aa, Artificial Sequence
  Description of Artificial Sequence: Synthetic polypeptide
MGILPSPGMPALLSLVSLLSVLLMGCVAETGTRFPNITNLCPFGEVFNATRFASVYAWNRKRISNCVADYSVLYLSASFSTFKCYGVSPTKLNDLCFTNVYADSFVIRGDEVRQIAPGQTGKIADYNYKLPDDFTGCVIAWNSNNLDSKVGGNYNYLYRLFRKSNLKPFERDISTEIYQAGSTPCNGVEGFNCYFPLQSYGFQPTNGVGYQPYRVVVLSFELLHAPATVCGPKKSTHHHHHHHH

SEQ ID NO: 6217 - protein, 244 aa, Artificial Sequence
  Description of Artificial Sequence: Synthetic polypeptide
MGILPSPGMPALLSLVSLLSVLLMGCVAETGTRFPNITNLCPFGEVFNATRFASVYAWNRKRISNCVADYSVLYNSASFSTFKCYGVSPTKLNDLCFTNVYADSFVIRGDEVRQIAPGQTGKIADYNYKLPDDFTGCVIAWNSNNLDSKVGGNYNYLYRLFRKSNLKPFERDISTEIYQAGSTPCNGVEGFNCYFPLQSYGFQPTNGVGYQPYRVVVLEFELLHAPATVCGPKKSTHHHHHHHH

SEQ ID NO: 6218 - protein, 244 aa, Artificial Sequence
  Description of Artificial Sequence: Synthetic polypeptide
MGILPSPGMPALLSLVSLLSVLLMGCVAETGTRFPNITNLCPFGEVFNATRFASVYAWNRKRISNCVADYSVLYNSASFSTFKCYGVSPTKLNDLCFTNVYADSFVIRGDEVRQIAPGQTGKIADYNYKLPDDFTGCVIAWNSNNLDSKVGGNYNYLYRLFRKSNLKPFERDISTECYQAGSTPCNGVEGFNCYFPLQSYGFQPTNGVGYQPYRVVVLSFELLHAPATVCGPKKSTHHHHHHHH

SEQ ID NO: 6219 - protein, 244 aa, Artificial Sequence
  Description of Artificial Sequence: Synthetic polypeptide
MGILPSPGMPALLSLVSLLSVLLMGCVAETGTRFPNITNLCPFGEVFNATRFASVYAWNRKRISNCVADYSVLYQSASFSTFKCYGVSPTKLNDLCFTNVYADSFVIRGDEVRQIAPGQTGKIADYNYKLPDDFTGCVIAWNSNNLDSKVGGNYNYLYRLFRKSNLKPFERDISTEIYQAGSTPCNGVEGFNCYFPLQSYGFQPTNGVGYQPYRVVVLSFELLHAPATVCGPKKSTHHHHHHHH

SEQ ID NO: 6220 - protein, 244 aa, Artificial Sequence
  Description of Artificial Sequence: Synthetic polypeptide
MGILPSPGMPALLSLVSLLSVLLMGCVAETGTRFPNITNLCPFGEVFNATRFASVYAWNRKRISNCVADYSVLYNSASFSTFKCYGVSPTKLNDLCFTNVYADSFVIRGDEVRQIAPGQTGKIADYNYKLPDDFTGCVIAWNSNKLDSKVGGNYNYLYRLFRKSNLKPFERDISTEIYQAGSTPCNGVEGFNCYFPLQSYGFQPTNGVGYQPYRVVVLSFELLHAPATVCGPKKSTHHHHHHHH

SEQ ID NO: 6221 - protein, 244 aa, Artificial Sequence
  Description of Artificial Sequence: Synthetic polypeptide
MGILPSPGMPALLSLVSLLSVLLMGCVAETGTRFPNITNLCPFGEVFNATRFASVYAWNRKRISNCVADYSVLYNSASFSTFKCYGVSPTKLNDLCFTNVYADSFVIRGDEVRQIAPGQTGKIADYNYKLPDDFTGCVIAWNSNNLDSKVGGNYNYLYRLFRKSNLKPFERDICTEIYQAGSTPCNGVEGFNCYFPLQSYGFQPTNGVGYQPYRVVVLSFELLHAPATVCGPKKSTHHHHHHHH

SEQ ID NO: 6222 - protein, 244 aa, Artificial Sequence
  Description of Artificial Sequence: Synthetic polypeptide
MGILPSPGMPALLSLVSLLSVLLMGCVAETGTRFPNITNLCPFGEVFNATRFASVYAWNRKRISNCVADYSVLYNSASFSTFKCYGVSPTKLNDLCFTNVYADSFVIRGDEVRQIAPGQTGKIADYNYKLPDDFTGCVIAWNSNNLDSKVGGNYNYLYRLFRKSNLKPFERDISTEIYQAGSTPCNAVEGFNCYFPLQSYGFQPTNGVGYQPYRVVVLSFELLHAPATVCGPKKSTHHHHHHHH

SEQ ID NO: 6223 - protein, 244 aa, Artificial Sequence
  Description of Artificial Sequence: Synthetic polypeptide
MGILPSPGMPALLSLVSLLSVLLMGCVAETGTRFPNITNLCPFGEVFNATRFASVYAWNRKRISNCVADYSVLYNSASFSTFKCYGVSPTKLNDLCFTNVYADSFVIRGDEVRQIAPGQTGKIADYNYKLPDDFTGCVIAWNSNNLDSKVGGNYNYLYRLFRKSNLKPFERDIQTEIYQAGSTPCNGVEGFNCYFPLQSYGFQPTNGVGYQPYRVVVLSFELLHAPATVCGPKKSTHHHHHHHH

SEQ ID NO: 6224 - protein, 244 aa, Artificial Sequence
  Description of Artificial Sequence: Synthetic polypeptide
MGILPSPGMPALLSLVSLLSVLLMGCVAETGTRFPNITNLCPFGEVFNATRFASVYAWNRKRISNCVADYSVLYNSASFSTFKCYGVSPTKLNDLCFTNVYADSFVIRGDEVRQIAPGQTGKIADYNYRLPDDFTGCVIAWNSNNLDSKVGGNYNYLYRLFRKSNLKPFERDISTEIYQAGSTPCNGVEGFNCYFPLQSYGFQPTNGVGYQPYRVVVLSFELLHAPATVCGPKKSTHHHHHHHH

SEQ ID NO: 6225 - protein, 244 aa, Artificial Sequence
  Description of Artificial Sequence: Synthetic polypeptide
MGILPSPGMPALLSLVSLLSVLLMGCVAETGTRFPNITNLCPFGEVFNATRFASVYAWNRKRISNCVADYSVLYNSASFSTFKCYGVSPTKLNDLCFTNVYADSFVIRGDEVRQIAPGQTGKIADYNYKLPDDFTGCVIAWNSNNLDSKVGGNYNYLYRLFRKSNLKPFARDISTEIYQAGSTPCNGVEGFNCYFPLQSYGFQPTNGVGYQPYRVVVLSFELLHAPATVCGPKKSTHHHHHHHH

SEQ ID NO: 6226 - protein, 244 aa, Artificial Sequence
  Description of Artificial Sequence: Synthetic polypeptide
MGILPSPGMPALLSLVSLLSVLLMGCVAETGTRFPNITNLCPFGEVFNATRFASVYAWNRKRISNCVADYSVLYNSASFSTFKCYGVSPTKLNDLCFTNVYADSFVIRGDEVRQIAPGQTGKIADYNYKLPDDFTGCVIAWNSNNLDSKVGGNYNYLYRLFRKSNLKPFERDISTEIYQAGSTPCNGVEGFNCYFPLQSYGFQPTNGVGYQPYRVVVLSFELIHAPATVCGPKKSTHHHHHHHH

SEQ ID NO: 6227 - protein, 244 aa, Artificial Sequence
  Description of Artificial Sequence: Synthetic polypeptide
MGILPSPGMPALLSLVSLLSVLLMGCVAETGTRFPNITNLCPFGEVFNATRFASVYAWNRKRISNCVADYSVLYNSASFSTFKCYGVSPTKLNDLCFTNVYADSFVIRGDEVRQIAPGQTGKIADYNYKLPDDFTGCVIAWNSNNLDSKVGGNYNYLYRLFRKSNLKPFERDISTEIYQAGSTPCNGVEGFNCYFPLQSYGFQPTNGVGYQPYRVVILSFELLHAPATVCGPKKSTHHHHHHHH

SEQ ID NO: 6228 - protein, 244 aa, Artificial Sequence
  Description of Artificial Sequence: Synthetic polypeptide
MGILPSPGMPALLSLVSLLSVLLMGCVAETGTRFPNITNLCPFGEVFNATRFASVYAWNRKRISNCVADYSVLYNSASFSTFKCYGVSPTKLNDLCFTNVYADSFVIRGDEVRQIAPGQTGKIADYNYKLPDDFTGCVIAWNSNNLDSKVGGNYNYLYRLFRKSNLKPFERDISTQIYQAGSTPCNGVEGFNCYFPLQSYGFQPTNGVGYQPYRVVVLSFELLHAPATVCGPKKSTHHHHHHHH

SEQ ID NO: 6229 - protein, 244 aa, Artificial Sequence
  Description of Artificial Sequence: Synthetic polypeptide
MGILPSPGMPALLSLVSLLSVLLMGCVAETGTRFPNITNLCPFGEVFNATRFASVYAWNRKRISNCVADYSVLYNSASFSTFKCYGVSPTKLNDLCFTNVYADSFVIRGDEVRQIAPGQTGKIADYNYKLPDDFTGCVIAWNSNNLDSKVGGNYNYLYRLFRKSNLKPFEKDISTEIYQAGSTPCNGVEGFNCYFPLQSYGFQPTNGVGYQPYRVVVLSFELLHAPATVCGPKKSTHHHHHHHH

SEQ ID NO: 6230 - protein, 244 aa, Artificial Sequence
  Description of Artificial Sequence: Synthetic polypeptide
MGILPSPGMPALLSLVSLLSVLLMGCVAETGTRFPNITNLCPFGEVFNATRFASVYAWNRKRISNCVADYSVLYNSASFSTFKCYGVSPTKLNDLCFTNVYADSFVIRGDEVRQIAPGQTGKIADYNYKLPDDFTGCVIAWNSNNLDSKVGGNYNYLYRLFRKSNLKPFERDINTEIYQAGSTPCNGVEGFNCYFPLQSYGFQPTNGVGYQPYRVVVLSFELLHAPATVCGPKKSTHHHHHHHH

SEQ ID NO: 6231 - protein, 244 aa, Artificial Sequence
  Description of Artificial Sequence: Synthetic polypeptide
MGILPSPGMPALLSLVSLLSVLLMGCVAETGTRFPNITNLCPFGEVFNATRFASVYAWNRKRISNCVADYSVLYNSASFSTFKCYGVSPTKLNDLCFTNVYADSFVIRGDEVRQIAPGQTGKIADYNYKLPDDFTGCVIAWNSNTLDSKVGGNYNYLYRLFRKSNLKPFERDISTEIYQAGSTPCNGVEGFNCYFPLQSYGFQPTNGVGYQPYRVVVLSFELLHAPATVCGPKKSTHHHHHHHH

SEQ ID NO: 6232 - protein, 244 aa, Artificial Sequence
  Description of Artificial Sequence: Synthetic polypeptide
MGILPSPGMPALLSLVSLLSVLLMGCVAETGTRFPNITNLCPFGEVFNATRFASVYAWNRKRISNCVADYSVLYNSASFSTFKCYGVSPTKLNDLCFTNVYADSFVIRGDEVRQIAPGQTGKIADYNYKLPDDFTGCVIAWNSNNLDSKVGGNYNYLYRLFRKSNLKPFERDISTEIYQAGSTPCNGVEGFNCYFPLQSYGFQPTNGVGYQPYRVVVLFFELLHAPATVCGPKKSTHHHHHHHH

SEQ ID NO: 6233 - protein, 244 aa, Artificial Sequence
  Description of Artificial Sequence: Synthetic polypeptide
MGILPSPGMPALLSLVSLLSVLLMGCVAETGTRFPNITNLCPFGEVFNATRFASVYAWNRKRISNCVADYSVLYNSASFSTFKCYGVSPTKLNDLCFTNVYADSFVIRGDEVRQIAPGQTGKIADYNYKLPDDFTGCVIAWNSNNLDSKVGGNYNYLYRLFRKSNLKPFERDISTESYQAGSTPCNGVEGFNCYFPLQSYGFQPTNGVGYQPYRVVVLSFELLHAPATVCGPKKSTHHHHHHHH

SEQ ID NO: 6234 - protein, 244 aa, Artificial Sequence
  Description of Artificial Sequence: Synthetic polypeptide
MGILPSPGMPALLSLVSLLSVLLMGCVAETGTRFPNITNLCPFGEVFNATRFASVYAWNRKRISNCVADYSVLYNSASFSTFKCYGVSPTKLNDLCFTNVYADSFVIRGDEVRQIAPGQTGKIADYNYKLPDDFTGCVIAWNSNNLDSKVGGNYNYLYRLFRKSNLKPFERDISTEIYQAGSTPCNGVEGFNCYFPLQSYGFQPTNGVGYQPYRVVVLSFELRHAPATVCGPKKSTHHHHHHHH

SEQ ID NO: 6235 - protein, 244 aa, Artificial Sequence
  Description of Artificial Sequence: Synthetic polypeptide
MGILPSPGMPALLSLVSLLSVLLMGCVAETGTRFPNITNLCPFGEVFNATRFASVYAWNRKRISNCVADYSVLYTSASFSTFKCYGVSPTKLNDLCFTNVYADSFVIRGDEVRQIAPGQTGKIADYNYKLPDDFTGCVIAWNSNNLDSKVGGNYNYLYRLFRKSNLKPFERDISTEIYQAGSTPCNGVEGFNCYFPLQSYGFQPTNGVGYQPYRVVVLSFELLHAPATVCGPKKSTHHHHHHHH

SEQ ID NO: 6236 - protein, 244 aa, Artificial Sequence
  Description of Artificial Sequence: Synthetic polypeptide
MGILPSPGMPALLSLVSLLSVLLMGCVAETGTRFPNITNLCPFGEVFNATRFASVYAWNRKRISNCVADYSVLYNSASFSTFKCYGVSPTKLNDLCFTNVYADSFVIRGDEVRQIAPGQTGKIADYNYKLPDDFTGCVIAWNSNNLDSKVGGNYNYLYRLFRKSNLKPFERDISTEIYQAGSTPTNGVEGFNCYFPLQSYGFQPTNGVGYQPYRVVVLSFELLHAPATVCGPKKSTHHHHHHHH

SEQ ID NO: 6237 - protein, 244 aa, Artificial Sequence
  Description of Artificial Sequence: Synthetic polypeptide
MGILPSPGMPALLSLVSLLSVLLMGCVAETGTRFPNITNLCPFGEVFNATRFASVYAWNRKRISNCVADYSVLYNSASFSTFKCYGVSPTKLNDLCFTNVYADSFVIRGDEVRQIAPGQTGKIADYNYKLPDDFTGCVIAWNSNNLDSKVGGNYNYLYRLFRKSNLKPFERDISTTIYQAGSTPCNGVEGFNCYFPLQSYGFQPTNGVGYQPYRVVVLSFELLHAPATVCGPKKSTHHHHHHHH

SEQ ID NO: 6238 - protein, 244 aa, Artificial Sequence
  Description of Artificial Sequence: Synthetic polypeptide
MGILPSPGMPALLSLVSLLSVLLMGCVAETGTRFPNITNLCPFGEVFNATRFASVYAWNRKRISNCVADYSVLYNSASFSTFKCYGVSPTKLNDLCFTNVYADSFVIRGDEVRQIAPGQTGKIADYNYKLPDDFTGCVIAWNSNNLDSKVGGNYNYLYRLFRKSNLKPFERDISTEQYQAGSTPCNGVEGFNCYFPLQSYGFQPTNGVGYQPYRVVVLSFELLHAPATVCGPKKSTHHHHHHHH

SEQ ID NO: 6239 - protein, 244 aa, Artificial Sequence
  Description of Artificial Sequence: Synthetic polypeptide
MGILPSPGMPALLSLVSLLSVLLMGCVAETGTRFPNITNLCPFGEVFNATRFASVYAWNRKRISNCVADYSVLYNSASFSTFKCYGVSPTKLNDLCFTNVYADSFVIRGDEVRQIAPGQTGKIADYNYKLPDDFTGCVIAWNSNNLDSKVGGNYNYLYRLFRKSNLKPFERDISTEIYQAGSTPCNGVEGFNCYFPLQSYGFQPTNGVGYQPYRVVVLAFELLHAPATVCGPKKSTHHHHHHHH

SEQ ID NO: 6240 - protein, 244 aa, Artificial Sequence
  Description of Artificial Sequence: Synthetic polypeptide
MGILPSPGMPALLSLVSLLSVLLMGCVAETGTRFPNITNLCPFGEVFNATRFASVYAWNRKRISNCVADYSVLYNSASFSTFKCYGVSPTKLNDLCFTNVYADSFVIRGDEVRQIAPGQTGKIADYNYKLPDDFTGCVIAWNSNNLDSKVGGNYNYLYRLFRKSNLKPFERDISTIIYQAGSTPCNGVEGFNCYFPLQSYGFQPTNGVGYQPYRVVVLSFELLHAPATVCGPKKSTHHHHHHHH

SEQ ID NO: 6241 - protein, 244 aa, Artificial Sequence
  Description of Artificial Sequence: Synthetic polypeptide
MGILPSPGMPALLSLVSLLSVLLMGCVAETGTRFPNITNLCPFGEVFNATRFASVYAWNRKRISNCVADYSVLYNSASFSTFKCYGVSPTKLNDLCFTNVYADSFVIRGDEVRQIAPGQTGKIADYNYKLPDDFTGCVIAWNSNNLDSKVGGNYNYLYRLFRKSNLKPFERDISTEIYQAGSTPCNGVEGFNCYFPLQSYGFQPTNGVGYQPYRVVVLSFELSHAPATVCGPKKSTHHHHHHHH

SEQ ID NO: 6242 - protein, 244 aa, Artificial Sequence
  Description of Artificial Sequence: Synthetic polypeptide
MGILPSPGMPALLSLVSLLSVLLMGCVAETGTRFPNITNLCPFGEVFNATRFASVYAWNRKRISNCVADYSVLYNSASFSTFKCYGVSPTKLNDLCFTNVYADSFVIRGDEVRQIAPGQTGKIADYNYKLPDDFTGCVIAWNSNNLDSKVGGNYNYLYRLFRKSNLKPFERDISTEIYQAGSTPCNSVEGFNCYFPLQSYGFQPTNGVGYQPYRVVVLSFELLHAPATVCGPKKSTHHHHHHHH

SEQ ID NO: 6243 - protein, 244 aa, Artificial Sequence
  Description of Artificial Sequence: Synthetic polypeptide
MGILPSPGMPALLSLVSLLSVLLMGCVAETGTRFPNITNLCPFGEVFNATRFASVYAWNRKRISNCVADYSVLYNSASFSTFKCYGVSPTKLNDLCFTNVYADSFVIRGDEVRQIAPGQTGKIADYNYKLPDDFTGCVIAWNSNNLDSKVGGNYNYLYRLFRKSNLKPFERDIATEIYQAGSTPCNGVEGFNCYFPLQSYGFQPTNGVGYQPYRVVVLSFELLHAPATVCGPKKSTHHHHHHHH

SEQ ID NO: 6244 - protein, 244 aa, Artificial Sequence
  Description of Artificial Sequence: Synthetic polypeptide
MGILPSPGMPALLSLVSLLSVLLMGCVAETGTRFPNITNLCPFGEVFNATRFASVYAWNRKRISNCVADYSVLYNSASFSTFKCYGVSPTKLNDLCFTNVYADSFVIRGDEVRQIAPGQTGKIADYNYKLPDDFTGCVIAWNSNNLDSKVGGNYNYLYRLFRKSNLKPFGRDISTEIYQAGSTPCNGVEGFNCYFPLQSYGFQPTNGVGYQPYRVVVLSFELLHAPATVCGPKKSTHHHHHHHH

SEQ ID NO: 6245 - protein, 244 aa, Artificial Sequence
  Description of Artificial Sequence: Synthetic polypeptide
MGILPSPGMPALLSLVSLLSVLLMGCVAETGTRFPNITNLCPFGEVFNATRFASVYAWNRKRISNCVADYSVLYNSASFSTFKCYGVSPTKLNDLCFTNVYADSFVIRGDEVRQIAPGQTGKIADYNYKLPDDFTGCVIAWNSNNLDSKRGGNYNYLYRLFRKSNLKPFERDISTEIYQAGSTPCNGVEGFNCYFPLQSYGFQPTNGVGYQPYRVVVLSFELLHAPATVCGPKKSTHHHHHHHH

SEQ ID NO: 6246 - protein, 244 aa, Artificial Sequence
  Description of Artificial Sequence: Synthetic polypeptide
MGILPSPGMPALLSLVSLLSVLLMGCVAETGTRFPNITNLCPFGEVFNATRFASVYAWNRKRISNCVADYSVLYNSASFSTFKCYGVSPTKLNDLCFTNVYADSFVIRGDEVRQIAPGQTGKIADYNYKLPDDFTGCVIAWNSNNLDSKVGGNYNYLYRLFRKSNLKPFERDISTEIYQAGSTPCNGVEGFNCYFPLQSYGFQPTNGVGYQPYRVVVLSFELLWAPATVCGPKKSTHHHHHHHH

SEQ ID NO: 6247 - protein, 244 aa, Artificial Sequence
  Description of Artificial Sequence: Synthetic polypeptide
MGILPSPGMPALLSLVSLLSVLLMGCVAETGTRFPNITNLCPFGEVFNATRFASVYAWNRKRISNCVADYSVLYNSASFSTFKCYGVSPTKLNDLCFTNVYADSFVIRGDEVRQIAPGQTGKIADYNYKLPDDFTGCVIAWNSNNLDSKVGGNYNYLYRLFRKSNLKPFERDISYEIYQAGSTPCNGVEGFNCYFPLQSYGFQPTNGVGYQPYRVVVLSFELLHAPATVCGPKKSTHHHHHHHH

SEQ ID NO: 6248 - protein, 244 aa, Artificial Sequence
  Description of Artificial Sequence: Synthetic polypeptide
MGILPSPGMPALLSLVSLLSVLLMGCVAETGTRFPNITNLCPFGEVFNATRFASVYAWNRKRISNCVADYSVLYNSASFSTFKCYGVSPTKLNDLCFTNVYADSFVIRGDEVRQIAPGQTGKIADYNYKLPDDFTGCVIAWNSNNLDSKVGGNYNYLYRLFRKSNLKPFERDISKEIYQAGSTPCNGVEGFNCYFPLQSYGFQPTNGVGYQPYRVVVLSFELLHAPATVCGPKKSTHHHHHHHH

SEQ ID NO: 6249 - protein, 244 aa, Artificial Sequence
  Description of Artificial Sequence: Synthetic polypeptide
MGILPSPGMPALLSLVSLLSVLLMGCVAETGTRFPNITNLCPFGEVFNATRFASVYAWNRKRISNCVADYSVLYNSASFSTFKCYGVSPTKLNDLCFTNVYADSFVIRGDEVRQIAPGQTGKIADYNYKLPDDFTGCVIAWNSNNLDSKVGGNYNYLYRLFRKSNLKPFERDISTEIYQAGSTPCNGVEGFNCYFPLQSYGFQPTNGVGYQPYRVVVLSFELLQAPATVCGPKKSTHHHHHHHH

SEQ ID NO: 6250 - protein, 244 aa, Artificial Sequence
  Description of Artificial Sequence: Synthetic polypeptide
MGILPSPGMPALLSLVSLLSVLLMGCVAETGTRFPNITNLCPFGEVFNATRFASVYAWNRKRISNCVADYSVLYNSASFSTFKCYGVSPTKLNDLCFTNVYADSFVIRGDEVRQIAPGQTGKIADYNYKLPDDFTGCVIAWNSNNLDSKVGGNYNYLYRLFRKSNLKPFERDISTRIYQAGSTPCNGVEGFNCYFPLQSYGFQPTNGVGYQPYRVVVLSFELLHAPATVCGPKKSTHHHHHHHH

SEQ ID NO: 6251 - protein, 244 aa, Artificial Sequence
  Description of Artificial Sequence: Synthetic polypeptide
MGILPSPGMPALLSLVSLLSVLLMGCVAETGTRFPNITNLCPFGEVFNATRFASVYAWNRKRISNCVADYSVLYNSASFSTFKCYGVSPTKLNDLCFTNVYADSFVIRGDEVRQIAPGQTGKIADYNYKLPDDFTGCVIAWNSNNLDSKVGGNYNYLYRLFRKSNLKPFERDISTEIYQAGSTPCNGVEGFNCYFPLQSYGFQPTNGVGYQPYRVVVLSFELLMAPATVCGPKKSTHHHHHHHH

SEQ ID NO: 6252 - protein, 244 aa, Artificial Sequence
  Description of Artificial Sequence: Synthetic polypeptide
MGILPSPGMPALLSLVSLLSVLLMGCVAETGTRFPNITNLCPFGEVFNATRFASVYAWNRKRISNCVADYSVLYNSASFSTFKCYGVSPTKLNDLCFTNVYADSFVIRGDEVRQIAPGQTGKIADYNYKLPDDFTGCVIAWNSNLLDSKVGGNYNYLYRLFRKSNLKPFERDISTEIYQAGSTPCNGVEGFNCYFPLQSYGFQPTNGVGYQPYRVVVLSFELLHAPATVCGPKKSTHHHHHHHH

SEQ ID NO: 6253 - protein, 244 aa, Artificial Sequence
  Description of Artificial Sequence: Synthetic polypeptide
MGILPSPGMPALLSLVSLLSVLLMGCVAETGTRFPNITNLCPFGEVFNATRFASVYAWNRKRISNCVADYSVLYNSASFSTFKCYGVSPTKLNDLCFTNVYADSFVIRGDEVRQIAPGQTGKIADYNYKLPDDFTGCVIAWNSNNLDSKDGGNYNYLYRLFRKSNLKPFERDISTEIYQAGSTPCNGVEGFNCYFPLQSYGFQPTNGVGYQPYRVVVLSFELLHAPATVCGPKKSTHHHHHHHH

SEQ ID NO: 6254 - protein, 244 aa, Artificial Sequence
  Description of Artificial Sequence: Synthetic polypeptide
MGILPSPGMPALLSLVSLLSVLLMGCVAETGTRFPNITNLCPFGEVFNATRFASVYAWNRKRISNCVADYSVLYNSASFSTFKCYGVSPTKLNDLCFTNVYADSFVIRGDEVRQIAPGQTGKIADYNYKLPDDFTGCVIAWNSNNLDSKVGGNYNYLYRLFRKSNLKPFERDISTEIYQAGSTPQNGVEGFNCYFPLQSYGFQPTNGVGYQPYRVVVLSFELLHAPATVCGPKKSTHHHHHHHH

SEQ ID NO: 6255 - protein, 244 aa, Artificial Sequence
  Description of Artificial Sequence: Synthetic polypeptide
MGILPSPGMPALLSLVSLLSVLLMGCVAETGTRFPNITNLCPFGEVFNATRFASVYAWNRKRISNCVADYSVLYNSASFSTFKCYGVSPTKLNDLCFTNVYADSFVIRGDEVRQIAPGQTGKIADYNYKLPDDFTGCVIAWNSNNLDSKVGGNYNYLYRLFRKSNLKPFERDISTENYQAGSTPCNGVEGFNCYFPLQSYGFQPTNGVGYQPYRVVVLSFELLHAPATVCGPKKSTHHHHHHHH

SEQ ID NO: 6256 - protein, 244 aa, Artificial Sequence
  Description of Artificial Sequence: Synthetic polypeptide
MGILPSPGMPALLSLVSLLSVLLMGCVAETGTRFPNITNLCPFGEVFNATRFASVYAWNRKRISNCVADYSVLYNSASFSTFKCYGVSPTKLNDLCFTNVYADSFVIRGDEVRQIAPGQTGKIADYNYKLPDDFTGCVIAWNSNNLDSKVGGNYNYLYRLFRKSNLKPFERDISTEIYQAGSTPCNGVEGFNCYFPLQSYDFQPTNGVGYQPYRVVVLSFELLHAPATVCGPKKSTHHHHHHHH
